(19) United States
(12) Patent Application Publication
(10) Pub. No.: US 2023/0406887 A1
(43) Pub. Date: Dec. 21, 2023

(54) ANTIGEN BINDING DOMAIN WITH REDUCED CLIPPING RATE

(71) Applicants: AMEGEN INC., Thousand Oaks, CA (US); AMGEN RESEARCH (MUNICH GMBH) GMBH, Munich (DE)

(72) Inventors: Johannes Brozy, Munich (DE); Markus Muenz, Munich (DE); Andrew Dykstra, Thousand Oaks, CA (US)

(21) Appl. No.: 18/251,133

(22) PCT Filed: Nov. 8, 2021
(86) PCT No.: PCT/EP2021/080880

§ 371 Date: Apr. 28, 2023

Related U.S. Application Data
(60) Provisional application No. 63/110,840, filed on Nov. 6, 2020.

(51) Int. Cl. C07K 14/00; A61P 35/00

(52) U.S. Cl. CPC C07K 14/001; C07K 2319/74; C07K 2319/01; A61P 35/00

(57) ABSTRACT

The invention relates to a polypeptide or polypeptide construct comprising a first target antigen binding domain, wherein said first target antigen binding domain comprises a VH and a VL variable region linked by a peptide linker, wherein the peptide linker comprises or consists of S(G4X)n or (G4X)n, wherein X is selected from the group consisting of Q, T, N, C, G, A, V, I, L, and M, and wherein n is an integer selected from integers 1 to 20. The invention also relates to a method for improving stability of a polypeptide or polypeptide construct. Moreover, the invention relates to a polynucleotide encoding the polypeptide or polypeptide construct of the invention, a vector comprising said polynucleotide and a host cell transformed or transfected with said polynucleotide or with said vector. Moreover, the invention also provides for a process for the production of said polypeptide or polypeptide construct and a pharmaceutical composition comprising said polypeptide or polypeptide construct of the invention. Furthermore, the invention relates to medical uses of said polypeptide or polypeptide construct and kits comprising said polypeptide or polypeptide construct.

[0001] The invention relates to a polypeptide or polypeptide construct comprising a first target antigen binding domain, wherein said first target antigen binding domain comprises a VH and a VL variable region linked by a peptide linker, wherein the peptide linker comprises or consists of S(G4X)n or (G4X)n, wherein X is selected from the group consisting of Q, T, N, C, G, A, V, I, L, and M, and wherein n is an integer selected from integers 1 to 20. The invention also relates to a method for improving stability of a polypeptide or polypeptide construct. Moreover, the invention relates to a polynucleotide encoding the polypeptide or polypeptide construct of the invention, a vector comprising said polynucleotide and a host cell transformed or transfected with said polynucleotide or with said vector. Moreover, the invention also provides for a process for the production of said polypeptide or polypeptide construct and a pharmaceutical composition comprising said polypeptide or polypeptide construct of the invention. Furthermore, the invention relates to medical uses of said polypeptide or polypeptide construct and kits comprising said polypeptide or polypeptide construct.

[0002] Clipping, also known as fragmentation, of formulated, purified biomolecules e.g. antibodies, T cell engager antibodies, etc. during liquid storage is a widely observed liability. Depending on the rate in which clipping occurs, a liquid formulation may not be feasible without compromises regarding the stability and therefore composition of the biomolecule. Such compromises are not always an option, in particular in highly regulated environments such as, e.g., in the pharmaceutical industry where it is of utmost importance to provide functional, uniform and stable medicines. Since biomolecules come in a variety of shapes, structures and functions, there is an ongoing need to improve their stability by way of decreasing the clipping rate, i.e. the rate at which clipping occurs. One way of trying to reduce clipping is, for example, the lyophilization of the biomolecule. However, a need for lyophilized formulation may significantly impact the commercial production flexibility and thus may result in higher cost of goods for manufacturing (COGM). Another option is to manipulate the biomolecule itself so that it becomes less prone to clipping and, inter alia, allow a liquid formulation of the biomolecule. A liquid formulation of biomolecules versus lyophilization eliminates, for example, the need for the error-prone reconstitution process of lyophilized material, thereby increasing safety and handling comfort. Clipping occurs in particular also in polypeptides or polypeptide constructs comprising antibody-derived binding domains, such as, e.g., scFvs. As such, there is an ongoing need to reduce the clipping rate of corresponding biomolecules.

[0003] The invention relates a polypeptide or polypeptide construct comprising a first target antigen binding domain, wherein said first target antigen binding domain comprises a VH and a VL variable region linked by a peptide linker, wherein the peptide linker comprises or consists of S(G4X)n or (G4X)n, wherein X is selected from the group consisting of Q, T, N, C, G, A, V, I, L, and M, and wherein n is an integer selected from integers 1 to 20. Said peptide linker substitutes a S(G4S)n or (G4S)n linker linking said VH and VL variable region, wherein said substitution is preferably a conservative substitution, that is linker length remains the same in the substituted binding domain and the unmodified binding domain. Said substitution reduces the clipping rate of the antigen binding domain with the substitution as compared to said antigen binding domain without the substitution, i.e. with the S(G4S)n or (G4S)n linker. The clipping rate can be analysed by methods well known in the art, preferably reduced capillary electrophoresis (rCE-SDS) as described herein below and in the example section, to assess the amount of low molecular weight (LMW) species as a readout for the clipping rate.

[0004] The term “polypeptide construct” (alternatively referred to also as “compound” herein) refers to an antigen-binding (or epitope-binding) molecule comprising binding domains themselves comprising paratopes. In the context of the present invention, a polypeptide construct is understood as an organic polymer which comprises at least one continuous, unbranched amino acid chain that naturally is not existing, but was engineered. An example, and also preferred embodiment, of a polypeptide construct that is a single polypeptide is a BiTE® molecule that comprises a core structure comprising at least one functional target antigen binding domain together with at least one complete functional CD3 binding domain on a single polypeptide chain, wherein these domains are linked directly by flexible peptide (a “linker”) without any further inserted domain unlike, for example, Xmabs that comprise the target binder and the CD3 binder on different polypeptide chains. In the context of the present invention, such a polypeptide construct comprising more than one amino acid chain is likewise envisaged. It is preferred that the term “polypeptide” is used in connection with single chain forms of the compounds of the present invention, whereas “polypeptide construct” may preferably be more adequate to describe also polypeptides that comprise more than one polypeptide chain, for example two, three or four polypeptide chains. However, unless explicitly specified herein, both terms are used interchangeably herein. Preferably, the polypeptide or polypeptide construct of the invention is a single chain polypeptide or polypeptide construct. Additionally, the term “polypeptide construct” is also suitable to describe compounds of the invention that comprise one or more non-amino acid-based constituents. An amino acid chain of a polypeptide typically comprises at least 50 amino acids, preferably at least 100, 200, 300, 400 or 500 amino acids. It is also envisaged in the context of the present invention that an amino acid chain of a polymer is linked to an entity which is not composed of amino acids.

[0005] The polypeptides comprise structural and/or functional features based on the structure and/or function of an antibody, e.g., of a full-length immunoglobulin molecule. A polypeptide construct, hence, specifically and, preferably, selectively or immunospecifically binds to its target or antigen, more precisely to an epitope of said target or target antigen, and it comprises the heavy chain variable region (VH) and the light chain variable region (VL) naturally found in an antibody, or comprises domains derived therefrom. Accordingly, the constructs may alternatively be regarded as comprising paratope-structured and epitope-binding structures, such as those found in natural antibodies or fragments thereof. A polypeptide construct according to the invention comprises the minimum structural requirements of an antibody which allow for immunospecific target binding, i.e., a paratope that recognizes immunospecifically or immunoselectively an epitope on a target antigen unless specified differently. This minimum requirement may e.g. be defined by the presence of at least three light chain CDRs (i.e. CDR1, CDR2 and CDR3 of the VL region, also termed CDR-L1, CDRL2, and CDR-L3) and/or three heavy chain CDRs (i.e. CDR1, CDR2 and CDR3 of the VH region, also termed CDR-H1, CDR-H2 and CDR-H3), preferably of all six CDRs. A polypeptide construct may hence be characterized by the presence of three or, preferably, six CDRs in a binding domain, and the skilled person knows where (in which order) those CDRs are located within the paratopic binding structures. In accordance with the invention, and in relation to the first target antigen binding domain of the polypeptide or polypeptide construct, said paratopic binding structure is specified to be a target antigen binding domain characterized by the presence of a VH and VL region that, hence, comprise CDRs. Therefore, a polypeptide/polypeptide construct according to the invention comprises at least a paratopic binding structure being a binding domain binding selectively, immunospecifically and/or immunoselectively to a target antigen comprising VH and VL variable regions (with CDRs). Accordingly, a polypeptide/polypeptide construct according to the invention comprises a paratope selectively, immunospecifically and/or immunoselectively binding to a target antigen. The term “antigen-binding structure”, as used herein, refers to any polypeptide/polypeptide construct that comprises an antigen-binding structure or any molecule that has binding activity to a specified target antigen. Said antigen-binding structures or molecules are not limited to those derived from a living organism, and for example, they may be a polypeptide produced from an artificially designed sequence. They may also be any of a naturally occurring polypeptide, synthetic polypeptide, recombinant polypeptide, and such. As the antigen-binding structure in accordance with the present invention bind specifically to parts of an antigen, the antigen (epitope)-binding structure may also be broadly defined as “paratopic structure” herein. Accordingly, the polypeptides/polypeptide constructs according to the invention may also be defined as a domain comprising a paratope that are preferably immunospecifically or immunoselectively binding to a target antigen/target epitope; and in certain embodiments comprising at least a further paratope, preferably immunospecifically or immunoselectively, binding to a further, different or same, target antigen/target epitope. Therefore, whenever the present description refers to a domain of a construct or molecule of the present invention, the construct comprises at least one paratopic structure (or paratope) binding a target antigen, such as, preferably, CD3 and/or a tumor antigen, as specified herein, particularly according to any one of the appended claims. In certain embodiments, said construct comprises at least a further paratope/binding domain binding a further target antigen as defined herein.

[0006] The term “antibody” as used in accordance with the invention comprises full-length antibodies, also including camelid antibodies and other immunoglobulins generated by biotechnological or protein engineering methods or processes. These full-length antibodies may be for example monoclonal, recombinant, chimeric, deimmunized, humanized and human antibodies, as well as antibodies from other species such as mouse, hamster, rabbit, rat, goat, or non-human primates.

[0007] “Polypeptides/polypeptide constructs” of the present invention comprise a linker linking the VH and VL region of the binding domain, preferably resulting in a scFv, and/or, in other embodiments, comprise at least one further binding domain comprising a paratope, they do not occur naturally, and they are markedly different in their function from naturally occurring products. A polypeptide or polypeptide construct of the invention is hence an artificial “hybrid” molecule comprising an scFv and/or, in some embodiments, distinct paratopes/binding domains with different specificities and/or selectivities.

[0008] As indicated above, the polypeptides/polypeptide constructs of the invention may comprise more than one polypeptide chain, i.e. polypeptides comprising two or more polypeptide chains are also subject to the present invention, particularly polypeptides forming a three-dimensional protein-like structure that allows for the immunospecific binding to at least one target antigen. Therefore, the definition of the term “polypeptide construct” includes molecules consisting of only one polypeptide chain as well as molecules consisting of two, three, four or more polypeptide chains, which chains can be either identical (homodimers, homotrimers or homo oligomers) or different (heterodimer, heterotrimer or heterooligomer). Examples for the above identified antibodies and their fragments, variants, derivatives and constructs derived therefrom are described inter alia in Harlow and Lane, Antibodies: A laboratory manual, CSHL Press (1988); Kontermann and Dübel, Antibody Engineering, Springer, 2nd ed. 2010; and Little, Recombinant Antibodies for Immunotherapy, Cambridge University Press 2009.

[0009] “Polypeptides/polypeptide constructs” of the present invention may also comprise fragments of full-length antibodies, such as VH, VHH, VL, (s)dAb, Fv, light chain (VL-CL), Fd (VH-CH1), heavy chain, Fab, Fab′, F(ab′)2 or “rIgG” (“half antibody” consisting of a heavy chain and a light chain), whereas evidently not all of the foregoing fragments are applicable for the first target binding domain since it is defined to comprise a VH and a VL region linked by a peptide linker, but to the embodiments regarding the at least one further binding domain. Polypeptides/polypeptide constructs according to the invention may also comprise modified fragments of antibodies, also called antibody variants or antibody derivatives. Examples include, but are not limited to, scFv, di-scFv or bi(s)-scFv, scFv-Fc, scFv-zipper, scFab, Fab2, Fab3, diabodies, single chain diabodies, tandem diabodies (Tandab's), tandem di-scFv, tandem tri-scFv, “minibodies” exemplified by a structure which is as follows: (VH-VL-CH3)2, (scFv-CH3)2, ((scFv)2-CH3+CH3), ((scFv)2-CH3) or (scFv-CH3-scFv)2, multibodies such as triabodies or tetrabodies, and single domain antibodies such as nanobodies or single variable domain antibodies comprising merely one variable region, which might be VHH, VH or VL, that selectively and, preferably, specifically binds to an antigen or target independently of other variable regions or domains, whereas not all of the foregoing fragments are applicable for the first target antigen binding domain since it is defined to comprise a VH and a VL region, but to the embodiments regarding the at least one further binding domain. Further possible formats comprised in the polypeptides/polypeptide constructs according to the invention are cross bodies, maxi bodies, hetero Fc constructs, mono Fc constructs and scFc constructs. Examples for those formats will be described herein below.

[0010] Furthermore, the definition of the term “polypeptide construct” includes bivalent and polyvalent/multivalent polypeptides/polypeptide constructs as well as bispecific and polyspecific/multispecific polypeptides/polypeptide constructs, which selectively and, preferably, specifically bind to two, three or more antigenic structures (epitopes), through distinct binding domains. A polypeptide construct can have more binding valences than specificities, e.g. in a case where it has two binding domains for one target (CD3epsilon) and one binding domain for another target, for example those described herein below, or vice versa, in which case the polypeptide construct is trivalent and bispecific. In general, the term “bispecific” includes the meaning that a polypeptide construct binds to at least two different antigens, such as, preferably, CD3 and a further target antigen, preferably a tumor antigen, for example those specified herein below.

[0011] The terms “paratope”, “antigen-binding domain”, “epitope-binding domain”, “binding domain” or “domain which binds to . . . ” characterize, in connection with the present invention, a domain of the construct which selectively and, preferably, specifically or immunospecifically binds to/interacts with/recognizes an epitope on the target or target antigen. The terms “binding domain” or “domain which binds to . . . ” or “domain” as far as it relates to the herein described “constructs” characterizes in connection with the present invention a domain of the construct which immunospecifically binds to/interacts with/recognizes an epitope on the target or target antigen. The structure and function of the first binding domain (termed as first binding domain in the case of a polypeptide/polypeptide construct comprising a further, consequently second, third, and so on, binding domain), and preferably also the structure and/or function of any further binding domain (binding to for example to a target antigen such as a cell surface antigen, preferably a tumor antigen), is/are based on the structure and/or function of an antibody, e.g. of a full-length immunoglobulin polypeptide. The “binding domain” or “domain which binds to . . . ” may hence comprise the minimum structural requirements of an antibody which allow for immunospecific target binding. While the structural requirements of the first binding domain is specified to comprise a VH and VL region with corresponding three CDRs per region, said minimum structural requirement in any further binding domain may e.g. be defined by the presence of at least three light chain CDRs (i.e. CDR1, CDR2 and CDR3 of the VL region) and/or of three heavy chain CDRs (i.e. CDR1, CDR2 and CDR3 of the VH region), preferably of all six CDRs. A “domain which binds to” (or a “binding domain”) may typically comprise an antibody light chain variable region (VL) and an antibody heavy chain variable region (VH); however, it does not have to comprise both, but may comprise only one of VH or VL, if not defined otherwise. Fd fragments, for example, often retain some antigen-binding function of the intact antigen-binding domain. The terms “paratope”, “antigen-binding structure” and “epitope-binding structure, as used herein, refer also to a portion of an antibody (or a molecule according to the invention), which comprises a region that specifically binds and is complementary to the whole or a portion of an antigen or a part thereof, i.e. an antibody can only bind to a particular portion of the antigen. The particular portion is called “epitope”. An antigen-binding domain can be provided from one or more antibody variable domains. Preferably, the antigen-binding domains contain antibody variable region that comprising both the antibody light chain variable region (VL) and antibody heavy chain variable region (VH). Such preferable antigen-binding domains include, for example, “single-chain Fv (scFv)”, “single-chain antibody”, “Fv”, “single-chain Fv2 (scFv2)”, “Fab”, and “F (ab”)2”. In accordance with the invention, the first binding domain takes the form of a scFv.

[0012] Examples for the format of a “domain which binds to”, “domain comprising a paratope” (or “binding domain”, “antigen-binding structure”, “epitope-binding structure”) include, unless otherwise defined, but are not limited to, full-length antibodies, fragments of full-length antibodies (such as VH, VHH, VL), (s)dAb, Fv, light chain (VL-CL), Fd (VH-CH1), heavy chain, Fab, Fab′, F(ab′)2 or “r IgG” (“half antibody”)), antibody variants or derivatives such as scFv, di-scFv or bi(s)-scFv, scFv-Fc, scFv-zipper, scFab, Fab2, Fab3, diabodies, single chain diabodies, tandem diabodies (Tandab's), tandem di-scFv, tandem tri-scFv, “minibodies” (selected from formats such as (VH-VL-CH3)2, (scFv-CH3)2, ((scFv)2-CH3+CH3)), ((scFv)2-CH3) or (scFv-CH3-scFv)2, multibodies such as triabodies or tetrabodies, and single domain antibodies such as nanobodies or single variable domain antibodies comprising merely one variable region, which might be VHH, VH or VL. It is understood herein, that the first binding domain defined as a scFv, so that some of the above formats can only relate to the at least further binding domain that may be comprised in the polypeptide or polypeptide construct of the invention. Further examples for the format of a “domain which binds to” (or a “binding domain”) include (1) an antibody fragment or variant comprising VL, VH, CL and CH1 (such as Fab); (2) an antibody fragment or variant comprising two linked Fab fragments (such as a F(ab′)2); (3) an antibody fragment or variant comprising VH and CH1 (such as Fd); (4) an antibody fragment or variant comprising VL and CL (such as the light chain); (5) an antibody fragment or variant comprising VL and VH (such as Fv); (5) a dAb fragment (Ward et al., (1989) Nature 341:544-546), which has a VH domain; (6) an antibody variant comprising at least three isolated CDRs of the heavy and/or the light chain; and (7) a single chain Fv (scFv). Examples for embodiments of constructs or binding domains according to the invention are e.g. described in WO 00/006605, WO 2005/040220, WO 2008/119567, WO 2010/037838, WO 2013/026837, WO 2013/026833, US 2014/0308285, US 2014/0302037, W O2014/144722, WO 2014/151910, and WO 2015/048272. In the context of the present invention, a paratope is understood as an antigen-binding site which is a part of a polypeptide as described herein and which recognizes and binds to an antigen. A paratope is typically a small region of about at least 5 amino acids. A paratope as understood herein typically comprises parts of antibody-derived heavy (VH) and light chain (VL) sequences. Each binding domain of a polypeptide according to the present invention is provided with a paratope comprising a set of 6 complementarity-determining regions (CDR loops) with three of each being comprised within the antibody-derived VH and VL sequence, respectively.

[0013] It is envisaged for the compounds, particularly for the constructs of the present invention that a) the construct is a single chain polypeptide or a single chain polypeptide construct, b) the first binding domain is in the format of an scFv, c) any further, such as a second binding and/or third domain is in the format of an scFv, d) the first and said further, such as said second and/or third domain are connected via a linker, preferably a peptide linker, such as the glycine/glutamine linker defined herein, and/or e) the construct comprises a domain providing an extended serum half-life, such as an Fc-based domain, or human serum albumin (HSA). Specific formats of corresponding compounds are described herein below. In the latter case namely regarding the HLE domain, the presence of which is a preferred embodiment, the term “polypeptide construct” makes clear that it may comprise more than a single peptide chain. A preferred Fc-based domain which extends the serum half-life (also termed “HLE” domain) comprises two polypeptide monomers, each comprising a hinge, a CH2 domain and a CH3 domain, wherein said two polypeptide monomers are fused to each other via a peptide linker; the format is in N-terminal to C-terminal order: hinge-CH2-CH3-linker-hinge-CH2-CH3.

[0014] The constructs of the present invention are preferably “in vitro generated constructs” and/or “recombinant constructs”. In the context of the present invention, the term “in vitro generated” refers to a construct according to the above definition where all or part of the binding domain or of a variable region (e.g., at least one CDR) is generated in a non-immune cell selection, e.g., in an in vitro phage display, on a protein chip or in any other method in which candidate amino acid sequences can be tested for their ability to bind to an antigen. This term thus preferably excludes sequences generated solely by genomic rearrangement in an immune cell in an animal. It is envisaged that the first and/or second domain of the construct is produced by or obtainable by phage display or library screening methods rather than by grafting CDR sequences from a pre-existing (monoclonal) antibody into a scaffold. A “recombinant construct” is a construct generated or produced using (inter alia) recombinant DNA technology or genetic engineering.

[0015] The constructs of the present invention are envisaged to be monoclonal. As used herein, polypeptides or constructs that are denominated “monoclonal” (mAb) are obtained from a population of substantially homogeneous antibodies/constructs, i.e., the individual antibodies/constructs comprised in the population are identical (in particular with respect to their amino acid sequence) except for possible naturally occurring mutations and/or post-translational modifications (e.g., isomerizations, amidations) that may be present in minor amounts. Monoclonal antibodies/constructs are highly specific, being directed against a single epitope within the antigen, in contrast to polyclonal antibody preparations which typically include different antibodies directed against different determinants (or epitopes). In addition to their specificity, monoclonal antibodies are advantageous in that they are synthesized by the hybridoma culture, hence uncontaminated by other immunoglobulins. The modifier “monoclonal” indicates the character of the antibody/construct as being obtained from a substantially homogeneous population of antibodies and is not to be construed as requiring production of the antibody by any specific method.

[0016] For the preparation of monoclonal antibodies, any technique providing antibodies produced by continuous cell line cultures can be used. For example, monoclonal antibodies to be used may be made by the hybridoma method first described by Koehler et al., Nature, 256: 495 (1975), or may be made by recombinant DNA methods (see, e.g., U.S. Pat. No. 4,816,567). Examples for further techniques to produce human monoclonal antibodies include the trioma technique, the human B-cell hybridoma technique (Kozbor, Immunology Today 4 (1983), 72) and the EBV-hybridoma technique (Cole et al., Monoclonal Antibodies and Cancer Therapy, Alan R. Liss, Inc. (1985), 77-96).

[0017] Hybridomas can then be screened using standard methods, such as enzyme-linked immunosorbent assay (ELISA) and surface plasmon resonance (BIACORE™) analysis, to identify one or more hybridomas that produce an antibody that selectively and, preferably, specifically or immunospecifically binds to a specified antigen. Any form of the relevant antigen may be used as the immunogen, e.g., recombinant antigen, naturally occurring forms, any variants or fragments thereof, as well as an antigenic peptide thereof. Surface plasmon resonance as employed in the BIAcore™ system can be used to increase the efficiency of phage antibodies/constructs which bind to an epitope of a target antigen (Schier, Human Antibodies Hybridomas 7 (1996), 97-105; Malmborg, J. Immunol. Methods 183 (1995), 7-13).

[0018] Another exemplary method of making constructs or binding domains includes screening protein expression libraries, e.g., phage display or ribosome display libraries. Phage display is described, for example, in Ladner et al., U.S. Pat. No. 5,223,409; Smith (1985) Science 228:1315-1317, Clackson et al., Nature, 352: 624-628 (1991) and Marks et al., J. Mol. Biol., 222: 581-597 (1991).

[0019] In addition to the use of display libraries, the relevant antigen can be used to immunize a non-human animal, e.g., a rodent (such as a mouse, hamster, rabbit or rat). In one embodiment, the non-human animal includes at least a part of a human immunoglobulin gene. For example, it is possible to engineer mouse strains deficient in mouse antibody production with large fragments of the human Ig (immunoglobulin) loci. Using the hybridoma technology, antigen-specific monoclonal antibodies derived from the genes with the desired specificity may be produced and selected. See, e.g., Xenomouse™, Green et al. (1994) Nature Genetics 7:13-21, US 2003-0070185, WO 96/34096, and WO 96/33735.

[0020] A monoclonal antibody can also be obtained from a non-human animal, and then modified, e.g., humanized, deimmunized, rendered chimeric etc., using recombinant DNA techniques known in the art. Examples of modified constructs or binding domains include humanized variants of non-human antibodies/constructs, “affinity matured” constructs or binding domains (see, e.g. Hawkins et al. J. Mol. Biol. 254, 889-896 (1992) and Lowman et al., Biochemistry 30, 10832-10837 (1991)) and antibody variants or mutants with altered effector function(s) (see, e.g., U.S. Pat. No. 5,648,260, Kontermann and Dubel (2010), loc. cit. and Little (2009), loc. cit.).

[0021] In immunology, affinity maturation is the process by which B cells produce antibodies with increased affinity for antigen during the course of an immune response. With repeated exposures to the same antigen, a host will produce antibodies of successively greater affinities. Like the natural prototype, the in vitro affinity maturation is based on the principles of mutation and selection. The in vitro affinity maturation has successfully been used to optimize antibodies, antibody fragments, antibody variants, constructs or binding domains. Random mutations inside the CDRs are introduced using radiation, chemical mutagens or error-prone PCR. In addition, the genetic diversity can be increased by chain shuffling. Two or three rounds of mutation and selection using display methods like phage display usually results in antibodies, antibody fragments, antibody variants, constructs or binding domains with affinities in the low nanomolar range.

[0022] A preferred type of an amino acid substitutional variation of the constructs or binding domains of the invention involves substituting one or more residues within the hypervariable region of a parent antibody structure (e.g. a humanized or human antibody structure). Generally, the resulting variant(s) selected for further development will have improved biological properties relative to the parent antibody structure from which they are generated. A convenient way for generating such substitutional variants involves affinity maturation using phage display. Briefly, several sites of the hypervariable region (e. g. 6-7 sites) are mutated to generate all possible amino acid substitutions at each site. The variants thus generated are displayed in a monovalent fashion from filamentous phage particles as fusions to the gene Ill product of M13 packaged within each particle. The phage-displayed variants are then screened for their biological activity (e.g. binding affinity) as disclosed herein. To identify candidate hypervariable region sites contributing significantly to antigen binding (candidates for modification), alanine scanning mutagenesis can also be performed. Alternatively, or additionally, it may be beneficial to analyze a crystal structure of the complex between the antigen and the construct or the binding domain to identify contact points between the binding domain and its specific antigen. Such contact residues and neighbouring residues are candidates for substitution according to the techniques elaborated herein. Once such variants are generated, the panel of variants is subjected to screening as described herein and antibodies, their antigen-binding fragments, constructs or binding domains with superior properties in one or more relevant assays may be selected for further development.

[0023] The constructs and binding domains of the present invention specifically include “chimeric” versions in which a portion of the heavy and/or light chain is identical with or homologous to corresponding sequences in antibodies derived from a particular species or belonging to a particular antibody class or subclass, while the remainder of the chain(s) is/are identical with or homologous to corresponding sequences in antibodies derived from another species or belonging to another antibody class or subclass, as well as fragments or variants of such antibodies, so long as they exhibit the desired biological activity (U.S. Pat. No. 4,816,567; Morrison et al., Proc. Natl. Acad. Sci. USA, 81: 6851-6855 (1984)). Chimeric constructs or binding domains of interest herein include “primitized” constructs comprising variable domain antigen-binding sequences derived from a non-human primate (e.g., Old World Monkey, Ape etc.) and human constant region sequences. A variety of approaches for making chimeric antibodies or constructs have been described. See e.g., Morrison et al., Proc. Natl. Acad. ScL U.S.A. 81:6851, 1985; Takeda et al., Nature 314:452, 1985, Cabilly et al., U.S. Pat. No. 4,816,567; Boss et al., U.S. Pat. No. 4,816,397; Tanaguchi et al., EP 0171496; EP 0173494; and GB 2177096.

[0024] An antibody, polypeptide construct, antibody fragment, antibody variant or binding domain may also be modified by specific deletion of human T cell epitopes (a method called “deimmunization”) using methods disclosed for example in WO 98/52976 or WO 00/34317. Briefly, the heavy and light chain variable regions of an antibody, construct or binding domain can be analyzed for peptides that bind to MHC class II; these peptides represent potential T cell epitopes (as defined e.g. in WO 98/52976 and WO 00/34317). For detection of potential T cell epitopes, a computer modeling approach termed “peptide threading” can be applied, and in addition a database of human MHC class II binding peptides can be searched for motifs present in the VH and VL sequences, as described in WO 98/52976 and WO 00/34317. These motifs bind to any of the 18 major MHC class II DR allotypes, and thus constitute potential T cell epitopes. Potential T cell epitopes detected can be eliminated by substituting small numbers of amino acid residues in the variable domains or variable regions, or preferably, by single amino acid substitutions. Typically, conservative substitutions are made. Often, but not exclusively, an amino acid common to a position in human germline antibody sequences may be used. Human germline sequences are disclosed e.g. in Tomlinson, et al. (1992) J. Mol. Biol. 227:776-798; Cook, G. P. et al. (1995) Immunol. Today Vol. 16 (5): 237-242; and Tomlinson et al. (1995) EMBO J. 14: 14:4628-4638. The V BASE directory (www2.mrc-lmb.cam.ac.uk/vbase/list2.php) provides a comprehensive directory of human immunoglobulin variable region sequences (compiled by Tomlinson, L A. et al. MRC Centre for Protein Engineering, Cambridge, UK). These sequences can be used as a source of human sequence, e.g., for framework regions and CDRs. Consensus human framework regions can also be used, for example as described in U.S. Pat. No. 6,300,064.

[0025] “Humanized” antibodies, variants or fragments thereof, constructs and binding domains are based on immunoglobulins of mostly human sequences, which contain (a) minimal sequence(s) derived from non-human immunoglobulin. For the most part, humanized antibodies, variants or fragments thereof, constructs and binding domains are based on human immunoglobulins (recipient antibodies) in which residues from a hypervariable region or CDR are replaced by residues from a hypervariable region or CDR of a non-human species (donor antibody) such as a rodent (e.g. mouse, hamster, rat or rabbit) having the desired specificity, affinity, capacity and/or biological activity. In some instances, Fv framework region (FR) residues of the human immunoglobulin are replaced by corresponding non-human residues. Furthermore, “humanized” antibodies, variants or fragments thereof, constructs and binding domains as used herein may also comprise residues which are found neither in the recipient antibody nor the donor antibody. These modifications are made to further refine and optimize antibody performance. The humanized antibodies, variants or fragments thereof, constructs and binding domains may also comprise at least a portion of an immunoglobulin constant region (such as Fc), typically that of a human immunoglobulin. For further details, see Jones et al., Nature, 321: 522-525 (1986); Reichmann et al., Nature, 332: 323-329 (1988); and Presta, Curr. Op. Struct. Biol., 2: 593-596 (1992).

[0026] Humanized antibodies, variants or fragments thereof, constructs and binding domains can be generated by replacing sequences of the (Fv) variable region that are not directly involved in antigen binding with equivalent sequences from human (Fv) variable regions. Exemplary methods for generating such molecules are provided by Morrison (1985) Science 229:1202-1207; by Oi et al. (1986) BioTechniques 4:214; and by U.S. Pat. Nos. 5,585,089; 5,693,761; 5,693,762; 5,859,205; and 6,407,213. These methods include isolating, manipulating, and expressing the nucleic acid sequences that encode all or part of immunoglobulin (Fv) variable regions from at least one of a heavy or light chain. Such nucleic acids may be obtained from a hybridoma producing an antibody against a predetermined target, as described above, as well as from other sources. The recombinant DNA encoding the humanized antibody, variant or fragment thereof, construct or binding domain can then be cloned into an appropriate expression vector.

[0027] Humanized antibodies, variants or fragments thereof, constructs and binding domains may also be produced using transgenic animals such as mice that express human heavy and light chain genes but are incapable of expressing the endogenous mouse immunoglobulin heavy and light chain genes. Winter describes an exemplary CDR grafting method that may be used to prepare the humanized molecules described herein (U.S. Pat. No. 5,225,539). All the CDRs of a given human sequence may be replaced with at least a portion of a non-human CDR, or only some of the CDRs may be replaced with non-human CDRs. It is only necessary to replace the number of CDRs required for binding of the humanized molecule to a predetermined antigen.

[0028] A humanized antibody, variant or fragment thereof, construct or binding domain can be optimized by the introduction of conservative substitutions, consensus sequence substitutions, germline substitutions and/or back mutations. Such altered immunoglobulin molecules can be made by any of several techniques known in the art, (e.g., Teng et al., Proc. Natl. Acad. Sci. U.S.A., 80: 7308-7312, 1983; Kozbor et al., Immunology Today, 4: 7279, 1983; Olsson et al., Meth. Enzymol., 92: 3-16, 1982, and EP 239 400).

[0029] Human anti-mouse antibody (HAMA) responses have led the industry to prepare chimeric or otherwise humanized antibodies/constructs. It is however expected that certain human anti-chimeric antibody (HACA) responses will be observed, particularly in chronic or multi-dose utilizations of an antibody or construct. Thus, it would be desirable to provide constructs comprising a human binding domain against a target, to vitiate concerns and/or effects of HAMA or HACA response.

[0030] Therefore, according to one embodiment, the polypeptide construct having at least one further binding domain, said binding domain(s) are “human”. The term “human antibody”, “human construct” and “human binding domain” includes antibodies, constructs and binding domains, respectively, having antibody-derived regions such as variable and constant regions or domains which correspond substantially to human germline immunoglobulin sequences known in the art, including, for example, those described by Kabat et al. (1991) (loc. cit.). The human constructs or binding domains of the invention may include amino acid residues not encoded by human germline immunoglobulin sequences (e.g., mutations introduced by random or site-specific mutagenesis in vitro or by somatic mutation in vivo), for example in the CDRs, and particularly in CDR3. The human constructs or binding domains can have at least one, two, three, four, five, or more positions replaced with an amino acid residue that is not encoded by the human germline immunoglobulin sequence. The definition of human antibodies, constructs and binding domains as used herein also contemplates fully human antibodies, constructs and binding domains which include only non-artificially and/or genetically altered human sequences of antibodies as those can be derived by using technologies or systems such as the Xenomouse.

[0031] Polypeptides/polypeptide constructs comprising at least one human binding domain may avoid some of the problems associated with antibodies or constructs that possess non-human such as rodent (e.g. murine, rat, hamster or rabbit) variable and/or constant regions. The presence of such rodent derived proteins can lead to the rapid clearance of the antibodies or constructs or can lead to the generation of an immune response against the antibody or construct by a patient. To avoid the use of rodent-derived constructs, humanized or fully human constructs can be generated through the introduction of human antibody function into a rodent so that the rodent produces fully human antibodies.

[0032] The ability to clone and reconstruct megabase-sized human loci in YACs and to introduce them into the mouse germline provides a powerful approach to elucidating the functional components of very large or crudely mapped loci as well as generating useful models of human disease. Furthermore, the use of such technology for substitution of mouse loci with their human equivalents could provide unique insights into the expression and regulation of human gene products during development, their communication with other systems, and their involvement in disease induction and progression.

[0033] An important practical application of such a strategy is the “humanization” of the mouse humoral immune system. Introduction of human immunoglobulin (Ig) loci into mice in which the endogenous Ig genes have been inactivated offers the opportunity to study the mechanisms underlying programmed expression and assembly of antibodies as well as their role in B-cell development. Furthermore, such a strategy could provide an ideal source for production of fully human monoclonal antibodies (mAbs)—an important milestone towards fulfilling the promise of antibody therapy in human disease. Fully human antibodies or constructs derived therefrom are expected to minimize the immunogenic and allergic responses intrinsic to mouse or mouse-derivatized mAbs and thus to increase the efficacy and safety of the administered antibodies/constructs. The use of fully human antibodies or constructs can be expected to provide a substantial advantage in the treatment of chronic and recurring human diseases, such as inflammation, autoimmunity, and cancer, which require repeated compound administrations.

[0034] One approach towards this goal was to engineer mouse strains deficient in mouse antibody production with large fragments of the human Ig loci in anticipation that such mice would produce a large repertoire of human antibodies in the absence of mouse antibodies. Large human Ig fragments would preserve the large variable gene diversity as well as the proper regulation of antibody production and expression. By exploiting the mouse machinery for antibody diversification and selection and the lack of immunological tolerance to human proteins, the reproduced human antibody repertoire in these mouse strains should yield high affinity antibodies against any antigen of interest, including human antigens. Using the hybridoma technology, antigen-specific human mAbs with the desired specificity could be readily produced and selected. This general strategy was demonstrated in connection with the generation of the first XenoMouse mouse strains (see Green et al. Nature Genetics 7:13-21 (1994)). The XenoMouse strains were engineered with yeast artificial chromosomes (YACs) containing 245 kb and 190 kb-sized germline configuration fragments of the human heavy chain locus and kappa light chain locus, respectively, which contained core variable and constant region sequences. The human Ig containing YACs proved to be compatible with the mouse system for both rearrangement and expression of antibodies and were capable of substituting for the inactivated mouse Ig genes. This was demonstrated by their ability to induce B cell development, to produce an adult-like human repertoire of fully human antibodies, and to generate antigen-specific human mAbs. These results also suggested that introduction of larger portions of the human Ig loci containing greater numbers of V genes, additional regulatory elements, and human Ig constant regions might recapitulate substantially the full repertoire that is characteristic of the human humoral response to infection and immunization. The work of Green et al. was extended to the introduction of greater than approximately 80% of the human antibody repertoire through introduction of megabase sized, germline configuration YAC fragments of the human heavy chain loci and kappa light chain loci, respectively. See Mendez et al. Nature Genetics 15:146-156 (1997) and U.S. patent application Ser. No. 08/759,620.

[0035] The production of the XenoMouse model is further discussed and delineated in U.S. patent application Ser. No. 07/466,008, Ser. No. 07/610,515, Ser. No. 07/919,297, Ser. No. 07/922,649, Ser. No. 08/031,801, Ser. No. 08/112,848, Ser. No. 08/234,145, Ser. No. 08/376,279, Ser. No. 08/430,938, Ser. No. 08/464,584, Ser. No. 08/464,582, Ser. No. 08/463,191, Ser. No. 08/462,837, Ser. No. 08/486,853, Ser. No. 08/486,857, Ser. No. 08/486,859, Ser. No. 08/462,513, Ser. No. 08/724,752, Ser. No. 08/759,620; and U.S. Pat. Nos. 6,162,963; 6,150,584; 6,114,598; 6,075,181, and 5,939,598 and Japanese Patent Nos. 3 068 180 B2, 3 068 506 B2, and 3 068 507 B2. See also Mendez et al. Nature Genetics 15:146-156 (1997) and Green and Jakobovits J. Exp. Med. 188:483-495 (1998), EP 0 463 151 B1, WO94/02602, WO96/34096, WO98/24893, WO 00/76310, and WO 03/47336.

[0036] In an alternative approach, others, including GenPharm International, Inc., have utilized a “minilocus” approach. In the minilocus approach, an exogenous Ig locus is mimicked through the inclusion of pieces (individual genes) from the Ig locus. Thus, one or more VH genes, one or more DH genes, one or more JH genes, a mu constant region, and a second constant region (preferably a gamma constant region) are formed into a construct for insertion into an animal. This approach is described in U.S. Pat. No. 5,545,807 to Surani et al. and U.S. Pat. Nos. 5,545,806; 5,625,825; 5,625,126; 5,633,425; 5,661,016; 5,770,429; 5,789,650; 5,814,318; 5,877,397; 5,874,299; and 6,255,458 each to Lonberg and Kay, U.S. Pat. Nos. 5,591,669 and 6,023,010 to Krimpenfort and Berns, U.S. Pat. Nos. 5,612,205; 5,721,367; and U.S. Pat. No. 5,789,215 to Berns et al., and U.S. Pat. No. 5,643,763 to Choi and Dunn, and GenPharm International U.S. patent application Ser. No. 07/574,748, Ser. No. 07/575,962, Ser. No. 07/810,279, Ser. No. 07/853,408, Ser. No. 07/904,068, Ser. No. 07/990,860, Ser. No. 08/053,131, Ser. No. 08/096,762, Ser. No. 08/155,301, Ser. No. 08/161,739, Ser. No. 08/165,699, Ser. No. 08/209,741. See also EP 0 546 073 B1, WO 92/03918, WO 92/22645, WO 92/22647, WO 92/22670, WO 93/12227, WO 94/00569, WO 94/25585, WO 96/14436, WO 97/13852, and WO 98/24884 and U.S. Pat. No. 5,981,175. See further Taylor et al. (1992), Chen et al. (1993), Tuaillon et al. (1993), Choi et al. (1993), Lonberg et al. (1994), Taylor et al. (1994), and Tuaillon et al. (1995), Fishwild et al. (1996).

[0037] Kirin has also demonstrated the generation of human antibodies from mice in which, through microcell fusion, large pieces of chromosomes, or entire chromosomes, have been introduced. See European Patent Application Nos. 773 288 and 843 961. Xenerex Biosciences is developing a technology for the potential generation of human antibodies. In this technology, SCID mice are reconstituted with human lymphatic cells, e.g., B and/or T cells. Mice are then immunized with an antigen and can generate an immune response against the antigen. See U.S. Pat. Nos. 5,476,996; 5,698,767; and 5,958,765.

[0038] In some embodiments, the constructs of the invention are “isolated” or “substantially pure” constructs. “Isolated” or “substantially pure”, when used to describe the constructs disclosed herein, means a construct that has been identified, separated and/or recovered from a component of its production environment. Preferably, the construct is free or substantially free of association with all other components from its production environment. Contaminant components of its production environment, such as that resulting from recombinant transfected cells, are materials that could interfere with diagnostic or therapeutic uses for the construct, and may include enzymes, hormones, and other proteinaceous or non-proteinaceous compounds. It is understood that the isolated or substantially pure construct may constitute from 5% to 99.9% by weight of the total protein/polypeptide content in a given sample, depending on the circumstances. The desired construct may be produced at a significantly higher concentration using an inducible promoter or high expression promoter. The definition includes the production of a construct in a wide variety of organisms and/or host cells that are known in the art. In certain embodiments, the construct will be purified (1) to a degree sufficient to obtain at least 15 residues of N-terminal or internal amino acid sequence by use of a spinning cup sequenator, or (2) to homogeneity by SDS-PAGE under non-reducing or reducing conditions using Coomassie Blue or, preferably, silver staining. Usually, however, an isolated construct will be prepared by at least one purification step.

[0039] According to one embodiment, the entire construct and/or the binding domains are in the form of one or more polypeptides or in the form of proteins. In addition to proteinaceous parts, such polypeptides or proteins may include non-proteinaceous parts (e.g. chemical linkers or chemical cross-linking agents such as glutaraldehyde).

[0040] Peptides are short chains of amino acid monomers linked by covalent peptide (amide) bonds. Hence, peptides fall under the broad chemical classes of biological oligomers and polymers. Amino acids that are part of a peptide or polypeptide chain are termed “residues” and can be consecutively numbered. All peptides except cyclic peptides have an N-terminal residue at one end and a C-terminal residue at the other end of the peptide. An oligopeptide consists of only a few amino acids (usually between two and twenty). A polypeptide is a longer, continuous, and unbranched peptide chain. Peptides are distinguished from proteins based on size, and as an arbitrary benchmark can be understood to contain approximately 50 or fewer amino acids. Proteins consist of one or more polypeptides, usually arranged in a biologically functional way. While aspects of the lab techniques applied to peptides versus polypeptides and proteins differ (e.g., the specifics of electrophoresis, chromatography, etc.), the size boundaries that distinguish peptides from polypeptides and proteins are not absolute. Therefore, in the context of the present invention, the terms “peptide”, “polypeptide” and “protein” may be used interchangeably, and the term “polypeptide” is often preferred.

[0041] Polypeptides may further form multimers such as dimers, trimers and higher oligomers, which consist of more than one polypeptide molecule, as mentioned above. Polypeptide molecules forming such dimers, trimers etc. may be identical or non-identical. The corresponding structures of higher order of such multimers are, consequently, termed homo- or heterodimers, homo- or heterotrimers etc. An example for a hereteromultimer is an antibody or immunoglobulin molecule, which, in its naturally occurring form, consists of two identical light polypeptide chains and two identical heavy polypeptide chains. The terms “peptide”, “polypeptide” and “protein” also refer to naturally modified peptides/polypeptides/proteins wherein the modification is accomplished e.g. by post-translational modifications like glycosylation, acetylation, phosphorylation and the like. A “peptide”, “polypeptide” or “protein” when referred to herein may also be chemically modified such as pegylated. Such modifications are well known in the art and described herein below.

[0042] The terms “selectively” and, “preferably, selectively”, “(specifically or immunospecifically) binds to”, “(specifically or immunospecifically) recognizes”, or “(specifically or immunospecifically) reacts with” mean in accordance with this invention that a construct or a binding domain selectively interacts or (immuno-)specifically interacts with a given epitope on the target molecule (antigen), for example: CD3. This selective interaction or association occurs more frequently, more rapidly, with greater duration, with greater affinity, or with some combination of these parameters, to an epitope on the specific target (for example: CD3epsilon) than to alternative substances (non-target molecules, e.g., here CD3gamma, etc.). Because of the sequence similarity between homologous proteins in different species, a construct or a binding domain that selectively and/or immunospecifically binds to its target (such as a human target) may, however, cross-react with homologous target molecules from different species (such as, from non-human primates). The terms “selectively binds to”, “specific/immunospecific binding”, etc. can hence include the binding of a construct or binding domain to epitopes or structurally related epitopes in more than one species. In the context of the present invention, a polypeptide of the present invention binds to its respective target structure in a particular manner. Preferably, a polypeptide according to the present invention comprises one paratope per binding domain which specifically or immunospecifically binds to”, “(specifically or immunospecifically) recognizes”, or “(specifically or immunospecifically) reacts with” its respective target structure. This means in accordance with this invention that a polypeptide or a binding domain thereof interacts or (immuno-)specifically interacts with a given epitope on the target molecule (antigen), for example CD3epsilon, and in certain embodiments with a given epitope on at least one further, such as a second and/or a third target molecule. This interaction or association occurs more frequently, more rapidly, with greater duration, with greater affinity, or with some combination of these parameters, to an epitope on the specific target than to alternative substances (non-target molecules). Because of the sequence similarity between homologous proteins in different species, an antibody construct or a binding domain that immunospecifically binds to its target (such as a human target) may, however, cross-react with homologous target molecules from different species (such as, from non-human primates). The term “specific/immunospecific binding” can hence include the binding of an antibody construct or binding domain to epitopes and/or structurally related epitopes in more than one species. The term “(immuno-) selectively binds does exclude the binding to structurally related epitopes within one species.

[0043] In the context of the present invention, the term “epitope” refers to the part or region of the antigen that is selectively recognized/immunospecifically recognized by the binding structure, i.e. the paratope. An “epitope” is antigenic, and thus the term epitope is sometimes also referred to as “antigenic structure” or “antigenic determinant”. The part of the binding domain that binds to the epitope is called a paratope. Specific binding is believed to be accomplished by specific motifs in the amino acid sequence of the binding domain and the antigen. Thus, binding is achieved because of their primary, secondary and/or tertiary structure as well as the result of potential secondary modifications of said structures. The specific interaction of the paratope with its antigenic determinant may result in a simple binding of said site to the antigen. In some cases, the specific interaction may alternatively or additionally result in the initiation of a signal, e.g. due to the induction of a change of the conformation of the antigen, an oligomerization of the antigen, etc.

[0044] The epitopes of protein antigens are divided into two categories, conformational epitopes and linear epitopes, based on their structure and interaction with the paratope. A conformational epitope is composed of discontinuous sections of the antigen's amino acid sequence. These epitopes interact with the paratope based on the three-dimensional surface features and shape or tertiary structure (folding) of the antigen. Methods of determining the conformation of epitopes include, but are not limited to, x-ray crystallography, two-dimensional nuclear magnetic resonance (2D-NMR) spectroscopy and site-directed spin labelling and electron paramagnetic resonance (EPR) spectroscopy. By contrast, linear epitopes interact with the paratope based on their primary structure. A linear epitope is formed by a continuous sequence of amino acids from the antigen and typically includes at least 3 or at least 4, and more usually, at least 5 or at least 6 or at least 7, for example, about 8 to about 10 amino acids in a unique sequence.

[0045] A method for epitope mapping for a given human target protein is described in the following: A pre-defined region (a contiguous amino acid stretch) within said given human target protein is exchanged/replaced with a corresponding region of a target protein paralogue (so long as the binding domain is not cross-reactive with the paralogue used). These human target/paralogue chimeras are expressed on the surface of host cells (such as CHO cells). Binding of the antibody or construct can be tested via FACS analysis. When the binding of the antibody or construct to the chimeric molecule is entirely abolished, or when a significant binding decrease is observed, it can be concluded that the region of human target which was removed from this chimeric molecule is relevant for the immunospecific epitope-paratope recognition. Said decrease in binding is preferably at least 10%, 20%, 30%, 40%, or 50%; more preferably at least 60%, 70%, or 80%, and most preferably 90%, 95% or even 100% in comparison to the binding to human (wild-type) target, whereby binding to the human target is set to be 100%. Alternatively, the above described epitope mapping analysis can be modified by introducing one or several point mutations into the sequence of the human target. These point mutations can e.g. reflect the differences between the human target and its paralogue.

[0046] A further method to determine the contribution of a specific residue of a target antigen to the recognition by a construct or binding domain is alanine scanning (see e.g. Morrison K L & Weiss G A. Curr Opin Chem Biol. 2001 June; 5(3):302-7), where each residue to be analyzed is replaced by alanine, e.g. via site-directed mutagenesis. Alanine is used because of its non-bulky, chemically inert, methyl functional group that nevertheless mimics the secondary structure references that many of the other amino acids possess. Sometimes bulky amino acids such as valine or leucine can be used in cases where conservation of the size of mutated residues is desired.

[0047] The interaction between the binding domain and the epitope of the target antigen implies that a binding domain exhibits appreciable or significant affinity for the epitope/the target antigen and, generally, does not exhibit significant affinity for proteins or antigens other than the target antigen—notwithstanding the above discussed cross-reactivity with homologous targets e.g. from other species. “Significant affinity” includes binding with an affinity (dissociation constant, KD) of ≤10-6 M. Preferably, binding is considered specific when the binding affinity is ≤10-7 M, ≤10-8 M, ≤10-9 M, ≤10-10 M, or even ≤10-11 M, or ≤10-12 M. Whether a binding domain (immuno-)specifically reacts with or binds to a target can be tested readily e.g. by comparing the affinity of said binding domain to its desired target protein or antigen with the affinity of said binding domain to non-target proteins or antigens. Preferably, a construct of the invention does not significantly bind to proteins or antigens other than the target antigen—unless any further binding domain(s) directed against a further target is/are deliberately introduced into the construct of the invention, in which case the binding of that binding domain to its specific target is also provided by the present invention.

[0048] It is envisaged that the affinity of the first domain is ≤100 nM, ≤90 nM, ≤80 nM, ≤70 nM, ≤60 nM, ≤50 nM, ≤40 nM, ≤30 nM, or ≤20 nM. These values are preferably measured in a cell-based assay, such as a Scatchard assay. Other methods of determining the affinity are also well-known. These values are preferably measured in a surface plasmon resonance assay, such as a Biacore assay.

[0049] The term “does not significantly bind” and “does not selectively bind” mean that a construct or binding domain of the present invention does not bind to a protein or antigen other than said target antigen, when said protein or antigen is expressed on the surface of a cell. The construct hence shows reactivity of ≤30%, preferably ≤20%, more preferably ≤10%, particularly preferably ≤9%, ≤8%, ≤7%, ≤6%, ≤5%, ≤4%, ≤3%, ≤2%, or ≤1% with proteins or antigens other than said target antigen (when said proteins or antigens are expressed on the surface of a cell), whereby binding to said target antigen, respectively, is set to be 100%. The “reactivity” can e.g. be expressed in an affinity value (see above).

[0050] It is envisaged that the construct of the invention (and more specifically the domain comprising a paratope/binding domain that binds to said first target antigen) does not bind or does not significantly bind to target antigen paralogues. It is also envisaged that the construct does not bind or does not significantly bind to (human or macaque/cyno) target antigen paralogues on the surface of a target cell.

[0051] The peptide linker is S(G4X)n and (G4X)n, wherein X is selected from the group consisting of Q, T, N, C, G, A, V, I, L, and M, and wherein n is an integer selected from integers 1 to 20. Preferably, X is selected from amino acids with polar uncharged side chains, namely Q, T, N, and amino acids with hydrophobic side chains, namely A, V, I, L, and M. In another preferred embodiment, X is selected from Q, T and N. Integer n is preferably selected from any integer in the range of 1 to 18, 1 to 16, 1 to 15, 1 to 14, 1 to 13, 1 to 12, 1 to 11, 1 to 10, 1 to 9, 1 to 8, 1 to 7, 1 to 6, 1 to 5, 1 to 3, 1 to 2, such as integers 1, 2, 3, 4, 5, 6, 7, 8, 9, 10, 11, 12, 13, 14, 15, 16, 17, and 18, preferably integers 1, 3 and 6. Corresponding linkers sequences are defined in SEQ ID NOs: 2 to 77. Preferred linkers of SEQ ID NOs: 15, 34, 53, and 72, as outlined also herein below.

[0052] It was observed that (G4S)n or S(G4S)n linkers (wherein n has the same definition as recited herein above) used in the scFv context as a standard peptide linker in the art, namely linking the VH and VL regions, are prone to clipping and therefore compromise the stability of these molecules or molecules comprising corresponding scFvs. Substituting said G4S linker, i.e., said (G4S)n or S(G4S)n linker(s), with a linker as defined herein, preferably a S(G4Q)n or (G4Q)n linker, contributes to a decrease in the clipping rate (see example section, for example, example 2, FIG. 5, Table 1). In larger molecules comprising more than a VH and VL region linked by a linker, also the other linkers, such as for example those linking binding domains, e.g. in a diabody or (scFv)2, such as a BiTE® molecule, can be exchanged and lead to a further reduction of the clipping rate as shown in the example section. More specifically, molecule assessment data for BiTE® molecules has shown that following incubation for four weeks at 40° C. (simulating two years of liquid storage at 4° C.), the percentage of low molecular weight (LMW) species measured by reduced capillary electrophoresis (rCE-SDS) (as a preferred means for assessing the clipping rate) ranged from 16.6% to 24.1% for two exemplary BiTE® molecules. Depending on the resulting LMW fragments, the pharmacokinetics of BiTE molecules such as the observed half-life in vivo or the efficacy and safety of the BiTE molecules can be impacted potentially reducing the utility for patients. To better understand factors that contribute to the observed levels of clipping, exemplary BiTE molecules (targeted towards PSMA and CD33), respectively, were generated with the following modifications: G4Q linker (vs. G4S linker in standard BiTE HLE molecules), stabilized CD3 binding domain (vs. standard CD3 binding domain), introduction of an engineered Cys clamp (vs. no Cys clamp) within the CD3 binding domain, and/or removal of certain single chain Fc (scFc) D-P and hinge sites (vs. standard scFc). All variants were tested for their in vitro activity compared to reference controls to determine impacts of the sequence variants on the potency. Additionally, BiTE molecule variants were incubated for four weeks at 40° C. and the total percentage of LMW species were monitored with rCE-SDS. Peptide mapping was used to monitor site-specific clipping. It could be shown that the introduced modifications significantly decreased overall clipping (introduction of G4Q linkers decreased the percentage of LMW by 7.1%). Combinations of these modifications showed that overall clipping in BiTE molecules after thermal degradation can be significantly decreased. In addition, the stabilized CD3 binding domain, insertion of G4Q linkers, and CD3 Cys clamp modifications all contribute to the reduction of clipping in the linker domains. Accordingly, it could be demonstrated that the linkers as defined herein, as well as the further modifications reduce the appearance of LMWs due to clipping, i.e. the clipping rate is decreased. As such, a liquid formulation of the polypeptides or polypeptide constructs of the invention is a valid option due to a reduction in the clipping rate.

[0053] Herein below, it is further outlined which linkers should have the form of the linkers as defined herein to improve stability of a given polypeptide or polypeptide by decreasing the clipping rate, including not only scFv binding domains but also half-life extending domains that can be part of the polypeptide or polypeptide construct of the invention. As such, and in other words, the invention relates to a single chain polypeptide or polypeptide construct comprising a first target antigen binding domain, wherein said first target antigen binding domain comprises a VH and a VL variable region linked by a peptide linker, wherein the peptide linker comprises or consists of S(G4X)n and (G4X)n, wherein X is selected from the group consisting of Q, T, N, C, G, A, V, I, L, and M, wherein n is an integer selected from integers 1 to 20, and wherein said linker replaces a S(G4S)n and (G4S)n linker.

[0054] In a preferred embodiment of the polypeptide or polypeptide construct of the invention, integer n is 1, 2, 3, 4, 5 or 6. The integer n is preferably be 2, 3, 4, 5 or 6, or, more preferred 1, 3 or 6.

[0055] In accordance with the invention, the X in S(G4X)n or (G4X)n is preferably Q. As such, the peptide linker is S(G4Q)n or (G4Q)n. Throughout the invention as described herein, the amino acid Q is the preferred amino acid for X. For example, the linker can be S(G4Q), S(G4Q)3, S(G4Q)6 or (G4Q), (G4Q)3 or (G4Q)6.

[0056] In a preferred embodiment, the peptide linker of polypeptide or polypeptide construct of the invention is S(G4X)n or (G4X)n, n is 3, and X is Q. Hence, the peptide linker has the format of (G4Q)3 (SEQ ID NO: 15) or S(G4Q)3.

[0057] In accordance with the invention, the polypeptide or polypeptide construct of the invention may comprise at least one further binding domain binding to a target antigen. As outlined herein above, the polypeptide or polypeptide construct of the invention may comprise at least one further target antigen binding domain and is thus at least a bispecific molecule. According to one embodiment, the polypeptide construct of the invention is, a “single chain construct” or “single chain polypeptide”. In the case of a further binding domain, it is also envisaged that either the first binding or the further (also termed “second”) or both binding domains may be in the format of a “single chain Fv” (scFv). Although the two domains of the Fv fragment, VL and VH, are coded for by separate genes, they can be joined, using recombinant methods, by an artificial linker—as described hereinbefore—that enables them to be made as a single protein chain in which the VL and VH regions pair to form a monovalent molecule; see e.g., Huston et al. (1988) Proc. Natl. Acad. Sci USA 85:5879-5883). These antibody fragments are obtained using conventional techniques known to those with skill in the art, and the fragments are evaluated for function in the same manner as are full-length antibodies or IgGs. A single-chain variable fragment (scFv) is hence a fusion protein of the variable region of the heavy chain (VH) and of the light chain (VL) of immunoglobulins, usually and in accordance with the invention connected with a short linker peptide. The linker is usually rich in glycine for flexibility, as well as serine or also threonine for solubility, and can either connect the N-terminus of the VH with the C-terminus of the VL, or vice versa. This protein retains the specificity of the original immunoglobulin, despite removal of the constant regions and introduction of the linker.

[0058] Bispecific single chain molecules are known in the art and are described in WO 99/54440, Mack, J. Immunol. (1997), 158, 3965-3970, Mack, PNAS, (1995), 92, 7021-7025, Kufer, Cancer Immunol. Immunother., (1997), 45, 193-197, Löffler, Blood, (2000), 95, 6, 2098-2103, Brühl, Immunol., (2001), 166, 2420-2426, Kipriyanov, J. Mol. Biol., (1999), 293, 41-56. Techniques described for producing single chain constructs (see, inter alia, U.S. Pat. No. 4,946,778, Kontermann and Dübel (2010), loc. cit. and Little (2009), loc. cit.) can be adapted to produce single chain constructs selectively and, preferably, specifically recognizing (an) elected target(s).

[0059] Bivalent (also called divalent) or bispecific single-chain variable fragments (bi-scFvs or di-scFvs) having the format (scFv)2 can be engineered by linking two scFv molecules (with linkers as described herein). The linking can be done by producing a single polypeptide chain with two VH regions and two VL regions, yielding tandem scFvs (see e.g. Kufer, P. et al., (2004) Trends in Biotechnology 22(5):238-244). Another possibility is the creation of scFv molecules with linker peptides that are too short for the two variable regions to fold together (e.g. about five amino acids; less than 12 amino acids), forcing the scFvs to dimerize. In this case, the VH and the VL of a binding domain (binding either to the first or the further target antigen) are not directly connected via a peptide linker. Thus, the VH of the first target antigen binding domain may e.g. be fused to the VL of the further target antigen binding domain via a peptide linker as defined herein, and the VH of the further target antigen binding domain is fused to the VL of the first binding domain via such peptide linker. This type is known as diabodies (see e.g. Hollinger, Philipp et al., (July 1993) Proceedings of the National Academy of Sciences of the United States of America 90 (14): 6444-8.). It is understood herein, that in such a scenario, the first target antigen binding domain of the main embodiment only comprises one half of a binding domain for said first target antigen, e.g. the VH region, while the rest of the said binding domain comprises half of the binding domain for the second target antigen, e.g. the VL region, which is in line with the invention to relate to polypeptide or polypeptide constructs comprising at least two binding domains, wherein said binding domains are as defined herein, namely having a VH and a VL region, and comprise at least one a peptide linker linking a VH and a VL region as defined herein, namely the peptide linker comprises or consists of S(G4X)n or (G4X)n, wherein X is selected from the group consisting of Q, T, N, C, G, A, V, I, L, and M, and wherein n is an integer selected from integers 1 to 20.

[0060] In accordance with the invention, the at least one further target antigen binding domain comprises the same components as the first target antigen binding domain. In accordance with this embodiment, the polypeptide or polypeptide construct comprises two binding domains that each have the format of VH/VL-Peptide Linker-VH/VL. As outlined herein above, corresponding polypeptides or polypeptide constructs include, for example, diabodies and (scFv)2 molecules. It is understood herein that the designation VH/VL-Peptide Linker-VH/VL means that both configurations are encompassed. Namely, in amino to carboxyl order, the format VH-Peptide Linker-VL, and VL-Peptide Linker-VH is encompassed by the invention.

[0061] In accordance with the invention, each target antigen binding domain binds to one target antigen. In this embodiment, each binding domain comprises all components allowing the binding to only one target antigen, hence, each binding domain comprises a VH and a VL region. In other terms, the VH and VL variable region of one target antigen binding domain binds to a target, whereas the VH and VL variable region of said at least one further target antigen binding domain binds to a target. Accordingly, this embodiment does not extend to a bispecific diabody where two scFvs dimerize to form two binding domains resulting from said dimerization of two polypeptide chains that are as defined in the main embodiment. Instead, it is preferred that the polypeptide or polypeptide construct of the invention is a (scFv)2. The following embodiments concern different formats of scFv-based polypeptide or polypeptide constructs in accordance with the invention. In all of these embodiments and in accordance with the invention, at least one binding domain is characterized by the presence of the linker as defined herein, namely said peptide linker that comprises or consists of S(G4X)n or (G4X)n, wherein X is selected from the group consisting of Q, T, N, C, G, A, V, I, L, and M, and wherein n is an integer selected from integers 1 to 20, and its preferred embodiments as laid out herein above. As also laid out herein above, said S(G4X)n or (G4X)n substitute S(G4S)n or (G4S)n in said different formats of scFv-based polypeptide or polypeptide constructs described in the following. Moreover, it is preferred that more than two, three, or, more preferred, all binding domains comprised in the polypeptide or polypeptide construct of the invention comprise said linker. As outlined to herein above, a corresponding polypeptide or polypeptide construct of the invention exhibits a reduced clipping rate in comparison to a corresponding, i.e. the same, polypeptide or polypeptide construct with the state of the art serine/glycine linkers.

[0062] In a preferred embodiment, the polypeptide or polypeptide construct of the invention comprises: Binding Domain 1 (VH/VL-Peptide Linker-VH/VL)-Linker-Binding Domain 2 (VH/VL-Peptide Linker-VH/VL). This embodiment concerns a single chain polypeptide comprising two binding domains, wherein one or both peptide linkers are as defined herein above, namely said peptide linker comprises or consists of S(G4X)n or (G4X)n, wherein X is selected from the group consisting of Q, T, N, C, G, A, V, I, L, and M, and wherein n is an integer selected from integers 1 to 20. Also outlined herein above, preferably, the peptide linker is (G4Q)3, preferably both peptide linkers within the binding domain are (G4Q)3. In other terms, the Binding Domain 1 and/or the Binding Domain 2 comprise a VH and a VL variable region linked by a peptide linker, wherein the peptide linker comprises or consists of S(G4X)n or (G4X)n, wherein X is selected from the group consisting of Q, T, N, C, G, A, V, I, L, and M, and wherein n is an integer selected from integers 1 to 20, i.e. the binding domain as defined herein above. As is understood herein, the feature in brackets, i.e. (VH/VL Peptide Linker-VH/VL) defines the structure of the binding domain(s).

[0063] Preferably, the first binding domain but also said at least one further binding domain binds to a cell surface antigen as target antigen. The term “cell surface antigen” as used herein denotes a molecule, which is displayed on the surface of a cell. In most cases, this molecule will be located in or on the plasma membrane of the cell such that at least part of this molecule remains accessible from outside the cell in tertiary form. A non-limiting example of a cell surface molecule, which is located in the plasma membrane is a transmembrane protein comprising, in its tertiary conformation, regions of hydrophilicity and hydrophobicity. Here, at least one hydrophobic region allows the cell surface molecule to be embedded, or inserted in the hydrophobic plasma membrane of the cell while the hydrophilic regions extend on either side of the plasma membrane into the cytoplasm and extracellular space, respectively. Non-limiting examples of cell surface molecules which are located on the plasma membrane are proteins which have been modified at a cysteine residue to bear a palmitoyl group, proteins modified at a C-terminal cysteine residue to bear a farnesyl group or proteins which have been modified at the C-terminus to bear a glycosyl phosphatidyl inositol (“GPI”) anchor.

[0064] According to one embodiment of the binding domains comprising the herein described paratopes, the VH-region is positioned N-terminally of the linker, and the VL-region is positioned C-terminally of the linker. In other words, in one embodiment of the binding domains comprising the herein described paratopes, the scFv comprises from the N-terminus to the C-terminus: VH-linker-VL. In accordance with the invention, the binding domains comprising the herein described paratopes of the construct are connected via a peptide linker as defined herein according to the invention. The construct may e.g. comprise the domains in the order (from N-terminus to C-terminus) one binding domain-linker-further binding domain. The inverse order (further binding domain-linker-first binding domain) is also possible.

[0065] In accordance with the invention, said polypeptide or polypeptide or polypeptide construct comprises: Binding Domain 1 (VH/VL-Peptide Linker-VH/VL)-Linker-Binding Domain 2 (VH/VL-Peptide Linker-VH/VL)-Binding Domain 3 (VH/VL-Peptide Linker-VH/VL).

[0066] In a preferred embodiment of the polypeptide or polypeptide construct of the invention, the C-terminal binding domain is binding to CD3, and wherein said remaining N-terminal binding domain(s) is/are binding to a cell surface antigen. Preferably, the polypeptide or polypeptide construct of the invention is a T cell engager. Accordingly, it is preferred that the polypeptide or polypeptide construct of the invention comprises at least a CD3 binding domain and a cell surface antigen (which is, preferably, a tumor antigen) binding domain as defined herein below. Hence, in accordance with the invention, said polypeptide or polypeptide or polypeptide construct comprises (preferably in amino to carboxyl order): Binding Domain 1 (tumor antigen binding domain: VH/VL-Peptide Linker-VH/VL)-Linker-Binding Domain 2 (CD3 binding domain: VH/VL-Peptide Linker-VH/VL), wherein binding domain 1 binds to a cell surface antigen, preferably a tumor antigen, and binding domain 2 binds to CD3, preferably human CD3, more preferred human CD3epsilon; or Binding Domain 1 (VH/VL-Peptide Linker-VH/VL)-Linker-Binding Domain 2 (VH/VL-Peptide Linker-VH/VL)-Binding Domain 3 (CD3 binding domain: VH/VL-Peptide Linker-VH/VL); wherein binding domain 1 and 2 bind to the same or different cell surface antigens, preferably the same or different tumor antigens, and binding domain 3 binds to CD3, preferably human CD3, more preferred human CD3epsilon. Preferably, the Binding Domain 2 is linked to Binding Domain 3 via a linker as defined herein taking the form of: Binding Domain 1 (VH/VL-Peptide Linker-VH/VL)-Linker-Binding Domain 2 (VH/VL-Peptide Linker-VH/VL)-Linker-Binding Domain 3 (VH/VL-Peptide Linker-VH/VL).

[0067] As laid out herein above, the polypeptide construct of the invention preferably comprises a binding domain which binds to CD3 on the surface of a T cell. “CD3” (cluster of differentiation 3) is a T cell co-receptor composed of four chains. In mammals, the CD3 protein complex contains a CD3γ (gamma) chain, a CD3δ (delta) chain, and two CD3ε (epsilon) chains. These four chains associate with the T cell receptor (TCR) and the so-called ζ (zeta) chain to for the “T cell receptor complex” and to generate an activation signal in T lymphocytes. The CD3γ (gamma), CD3δ (delta), and CD3ε (epsilon) chains are highly related cell-surface proteins of the immunoglobulin superfamily and each contain a single extracellular immunoglobulin domain. The intracellular tails of the CD3 molecules contain a single conserved motif known as an immunoreceptor tyrosine-based activation motif (ITAM), which is essential for the signaling capacity of the TCR. The CD3 epsilon molecule is a polypeptide which in humans is encoded by the CD3 epsilon gene which resides on chromosome 11. In the context of the present invention, CD3 is understood as a protein complex and T cell co-receptor that is involved in activating both the cytotoxic T cell (CD8+naive T cells) and T helper cells (CD4+ naive T cells). It is typically composed of four distinct chains. Especially in mammals, the complex contains a CD3γ chain, a CD3δ chain, and two CD3ε chains. These chains associate with the T-cell receptor (TCR) and the ζ-chain (zeta-chain) to generate an activation signal in T lymphocytes. The TCR, ζ-chain, and CD3 molecules together constitute the TCR complex.

[0068] The redirected lysis of target cells via the recruitment of T cells by a construct which binds to CD3 on the T cell and to a target protein on the target cell generally involves cytolytic synapse formation and delivery of perforin and granzymes. The engaged T cells are capable of serial target cell lysis and are not affected by immune escape mechanisms interfering with peptide antigen processing and presentation, or clonal T cell differentiation; see e.g. WO 2007/042261.

[0069] Cytotoxicity mediated by given tumor antigen×CD3 constructs can be measured in various ways. The “half maximal effective concentration” (EC50) is commonly used as a measure of potency of a biologically active molecule such as a construct of the present invention. It may be expressed in molar units. In the present case of measuring cytotoxicity, the EC50 value refers to the concentration of a construct inducing a cytotoxic response (lysis of target cells) halfway between the baseline and the maximum. Effector cells in a cytotoxicity assay can e.g. be stimulated enriched (human) CD8 positive T cells or unstimulated (human) peripheral blood mononuclear cells (PBMC). An EC50 value may typically be expected to be lower when stimulated/enriched CD8+ T cells are used as effector cells, compared with unstimulated PBMC. If the target cells are of macaque origin or express or are transfected with a given macaque tumor antigen, the effector cells should also be of macaque origin, such as a macaque T cell line, e.g. 4119LnPx. The target cells should express said tumor antigen on the cell surface. Target cells can be a cell line (such as CHO) which is stably or transiently transfected with said tumor antigen. Alternatively, the target cells can be a tumor antigen positive natural expresser cell line, such as the human cancer lines. Usually EC50 values are expected to be lower when using target cells that express higher levels of said tumor antigen on the cell surface compared with target cells having a lower target expression rate.

[0070] The effector to target cell (E:T) ratio in a cytotoxicity assay is usually about 10:1, but can also vary. Cytotoxic activity of tumor antigen×CD3constructs can be measured in a 51-chromium release assay (e.g. with an incubation time of about 18 hours) or in a in a FACS-based cytotoxicity assay (e.g. with an incubation time of about 48 hours). Modifications of the incubation time (cytotoxic reaction) are also envisaged. Other methods of measuring cytotoxicity are well-known and comprise MTT or MTS assays, ATP-based assays including bioluminescent assays, the sulforhodamine B (SRB) assay, WST assay, clonogenic assay and the ECIS technology.

[0071] According to one embodiment, the cytotoxic activity mediated by tumor antigen×CD3 constructs of the present invention is measured in a cell-based cytotoxicity assay. It may also be measured in a 51-chromium release assay. It is envisaged that the EC50 value of the constructs of the invention is ≤300 pM, ≤280 pM, ≤260 pM, ≤250 pM, ≤240 pM, ≤220 pM, ≤200 pM, ≤180 pM, ≤160 pM, ≤150 pM, ≤140 pM, ≤120 pM, ≤100 pM, ≤90 pM, ≤80 pM, ≤70 pM, ≤60 pM, ≤50 pM, ≤40 pM, ≤30 pM, ≤20 pM, ≤15 pM, ≤10 pM, or ≤5 pM.

[0072] The above given EC50 values can be measured in different assays and under different conditions. For example, when human PBMCs are used as effector cells and tumor antigen transfected cells such as CHO cells are used as target cells, it is envisaged that the EC50 value of the tumor antigen×CD3 construct is ≤500 pM, ≤400 pM, ≤300 pM, ≤280 pM, ≤260 pM, ≤250 pM, ≤240 pM, ≤220 pM, ≤200 pM, ≤180 pM, ≤160 pM, ≤150 pM, ≤140 pM, ≤120 pM, ≤100 pM, ≤90 pM, ≤80 pM, ≤70 pM, ≤60 pM, ≤50 pM, ≤40 pM, ≤30 pM, ≤20 pM, ≤15 pM, ≤10 pM, or ≤5 pM. When human PBMCs are used as effector cells and when the target cells are a CLDN6 positive cell line such as, it is envisaged that the EC50 value of the CLDN6×CD3 construct is ≤300 pM, ≤280 pM, ≤260 pM, ≤250 pM, ≤240 pM, ≤220 pM, ≤200 pM, ≤180 pM, ≤160 pM, ≤150 pM, ≤140 pM, ≤120 pM, ≤100 pM, ≤90 pM, ≤80 pM, ≤70 pM, ≤60 pM, ≤50 pM, ≤40 pM, ≤30 pM, ≤20 pM, ≤15 pM, ≤10 pM, or ≤5 pM.

[0073] According to one embodiment, the tumor antigen×CD3 polypeptides/polypeptide constructs of the present invention do not induce/mediate lysis or do not essentially induce/mediate lysis of cells that do not express said given tumor antigen on their surface (tumor antigen negative cells), such as CHO cells. The term “do not induce lysis”, “do not essentially induce lysis”, “do not mediate lysis” or “do not essentially mediate lysis” means that a construct of the present invention does not induce or mediate lysis of more than 30%, preferably not more than 20%, more preferably not more than 10%, particularly preferably not more than 9%, 8%, 7%, 6% or 5% of tumor antigen negative cells, whereby lysis of tumor antigen expressing target cells (such as cells transformed or transfected with said tumor antigen or a natural expresser cell line such as the human cancer lines) is set to be 100%. This usually applies for concentrations of the construct of up to 500 nM. Cell lysis measurement is a routine technique. Moreover, the present specification teaches specific instructions how to measure cell lysis.

[0074] The difference in cytotoxic activity between the monomeric and the dimeric isoform of individual tumor antigen×CD3 polypeptides/polypeptide constructs is referred to as “potency gap”. This potency gap can e.g. be calculated as ratio between EC50 values of the molecule's monomeric and dimeric form. In one method to determine this gap, an 18 hour 51-chromium release assay or a 48 h FACS-based cytotoxicity assay is carried out as described hereinbelow with purified construct monomer and dimer. Effector cells are stimulated enriched human CD8+ T cells or unstimulated human PBMC. Target cells are hu tumor antigen transfected CHO cells. Effector to target cell (E:T) ratio is 10:1. Potency gaps of the tumor antigen×CD3 constructs of the present invention are preferably ≤5, more preferably ≤4, even more preferably ≤3, even more preferably ≤2 and most preferably ≤1.

[0075] The binding domain(s) of the polypeptide construct of the invention is/are preferably cross-species specific for members of the mammalian order of primates, such as macaques. According to one embodiment, the further binding domain(s), in addition to binding to a human tumor antigen, will also bind to said tumor antigen of primates including (but not limited to) new world primates (such as Callithrix jacchus, Saguinus oedipus or Saimiri sciureus), old world primates (such as baboons and macaques), gibbons, orangutans and non-human hominidae. It is envisaged that the domain which binds to human CD3 on the surface of a T cell of the invention also binds at least to macaque CD3. A preferred macaque is Macaca fascicularis. Macaca mulatta (Rhesus) is also envisaged. The polypeptide or polypeptide construct of the invention comprises a domain which binds to human CD3epsilon on the surface of a T cell and at least macaque CD3.

[0076] In one embodiment, the affinity gap of the constructs according to the invention for binding macaque CD3 versus human CD3 [KD ma CD3: KD hu CD3] (as determined e.g. by BiaCore or by Scatchard analysis) is between 0.01 and 100, preferably between 0.1 and 10, more preferably between 0.2 and 5, more preferably between 0.3 and 4, even more preferably between 0.5 and 3 or between 0.5 and 2.5, and most preferably between 0.5 and 1.

[0077] As detailed herein above, said binding domain of the polypeptide or polypeptide construct of the invention binds to human CD3 epsilon (or human CD3 epsilon on the surface of a T cell) and, preferably, to Callithrix jacchus or Saimiri sciureus CD3 epsilon. More specifically, said domain binds to an extracellular epitope of human CD3 epsilon. It is also envisaged that said domain binds to an extracellular epitope of the human and the Macaca CD3 epsilon chain. Said extracellular epitope of CD3 epsilon is comprised within amino acid residues 1-27 of the human CD3 epsilon extracellular domain (see SEQ ID NO: 847; amino acid residues 1-27 in SEQ ID NO: 848). Even more particularly, the epitope comprises at least the amino acid sequence Gln-Asp-Gly-Asn-Glu. Callithrix jacchus is a new world primate belonging to the family of Callitrichidae, while Saimiri sciureus is a new world primate belonging to the family of Cebidae. Binders having such characteristics are described in detail in WO 2008/119567.

[0078] Antibodies or bispecific constructs directed against (human) CD3 or selectively and, preferably, specifically against CD3 epsilon are known in the art, and their CDRs, VH and VL sequences can serve as a basis for the binding domain of the polypeptide construct of the invention. For example, Kung et al. reported in 1979 the development of OKT3 (Ortho Kung T3), the first mAb recognizing CD3 (specifically, the epsilon chain of CD3) on human T cells. OKT3 (muromonab) was the first monoclonal antibody of murine origin to become available for therapy in humans. Newer anti-CD3 monoclonal antibodies include otelixizumab (TRX4), teplizumab (MGA031), foralumab and visilizumab, all targeting the epsilon chain of CD3. Bispecific constructs directed against a (cancer) target and CD3 are also being developed and (pre-)clinically tested, and their CD3 binding domain (CDRs, VH, VL) may serve as a basis for the second binding domain of the construct of the invention. Examples include, but are not limited to, Blinatumomab, Solitomab (MT110, AMG 110), Catumaxomab, Duvortuxizumab, Ertumaxomab, Mosunetuzumab, FBTA05 (Bi20, TPBs05), CEA-TCB (RG7802, RO6958688), AFM11, and MGD006 (S80880). Other examples of CD3 binding domains are disclosed e.g. in U.S. Pat. No. 7,994,289 B2, U.S. Pat. No. 7,728,114 B2, U.S. Pat. No. 7,381,803 B1, U.S. Pat. No. 6,706,265 E1.

[0079] Preferred combinations of CDR-L1 to L3 sequences of the VL region and preferred combinations of CDR-H1 to H3 sequences of the VH region of the CD3 binding domain are listed in the below list.

| CDR-L1 | CDR-L2 | CDR-L3 |
|---|---|---|
| GSSTGAVTSGYYPN | GTKFLAP | ALWYSNRWV |
| RSSTGAVTSGYYPN | ATDMRPS | ALWYSNRWV |
| GSSTGAVTSGNYPN | GTKFLAP | VLWYSNRWV |
| ASSTGAVTSGNYPN | GTKFLVP | TLWYSNRWV |
| RSSTGAVTTSNYAN | GTNKRAP | ALWYSNLWV |
| CDR-H1 | CDR-H2 | CDR-H3 |
| IYAMN | RIRSKYNNYATYYADSVKS | HGNFGNSYVSFFAY |
| KYAMN | RIRSKYNNYATYYADSVKD | HGNFGNSYISYWAY |
| SYAMN | RIRSKYNNYATYYADSVKG | HGNFGNSYLSFWAY |
| RYAMN | RIRSKYNNYATYYADSVKG | HGNFGNSYLSYFAY |
| VYAMN | RIRSKYNNYATYYADSVKK | HGNFGNSYLSWWAY |
| KYAMN | RIRSKYNNYATYYADSVKS | HGNFGNSYTSYYAY |
| GYAMN | RIRSKYNNYATYYADSVKE | HRNFGNSYLSWFAY |
| VYAMN | RIRSKYNNYATYYADSVKK | HGNFGNSYISWWAY |
| SYAMN | RIRSKYNNYATYYADSVKG | HGNFGNSYVSWWAY |
| KYAIN | RIRSKYNNYATYYADQVKD | HANFGNSYISYWAY |
| TYAMN | RIRSKYNNYATYYADSVKD | HGNFGNSYVSWFAY |

[0080] Preferably, any of the above listed combinations of CDR-L1 to L3 combinations is combined with any of the above-listed combinations CDR-H1 to H3 as part of the binding domain binding to an extracellular of the human CD3ε chain. In other words, the VL region comprises or consists of as CDR-L1, CDR-L2, CDR-L3 sequence, in this order, GSSTGAVTSGYYPN, GTKFLAP, ALWYSNRWV; RSSTGAVTSGYYPN, ATDMRPS, ALWYSNRWV; GSSTGAVTSGNYPN, GTKFLAP, VLWYSNRWV; ASSTGAVTSGNYPN, GTKFLVP, TLWYSNRWV; or RSSTGAVTTSNYAN, GTNKRAP, ALWYSNLWV; and the VL region comprises or consists of as CDR-H1, CDR-H2, CDR-H3 sequence, in this order,

IYAMN, RIRSKYNNYATYYADSVKS, HGNFGNSYVSFFAY;
KYAMN, RIRSKYNNYATYYADSVKD, HGNFGNSYISYWAY;
SYAMN, RIRSKYNNYATYYADSVKG, HGNFGNSYLSFWAY;
RYAMN, RIRSKYNNYATYYADSVKG, HGNFGNSYLSYFAY;
VYAMN, RIRSKYNNYATYYADSVKK, HGNFGNSYLSWWAY;
KYAMN, RIRSKYNNYATYYADSVKS, HGNFGNSYTSYYAY;
GYAMN, RIRSKYNNYATYYADSVKE, HRNFGNSYLSWFAY;
VYAMN, RIRSKYNNYATYYADSVKK, HGNFGNSYISWWAY;
SYAMN, RIRSKYNNYATYYADSVKG, HGNFGNSYVSWWAY;
KYAIN, RIRSKYNNYATYYADQVKD, HANFGNSYISYWAY;
or
TYAMN, RIRSKYNNYATYYADSVKD, HGNFGNSYVSWFAY.

In accordance with the invention, preferred CDR sequence combinations of the VH and the VL regions, listed in the order CDR-H1, CDR-H2, CDR-H3, CDR-L1, CDR-L2, CDR-L3, are as defined in SEQ ID NOs: 82 to 87; 88 to 93; 94 to 99; 100 to 105; 106 to 111; 112 to 117; 118 to 123; 124 to 129; 130 to 135; 136 to 141; 142 to 147; 148 to 153; 154 to 159; 160 to 165; 166 to 171; 172 to 177; 178 to 183; 184 to 189; 190 to 195; 196 to 201; 202 to 207; 208 to 213; 214 to 219; and 220 to 225.
Most preferred is that the VL region comprises as the CDR combinations as depicted in SEQ ID NOs: 106 to 111; 112 to 117; 118 to 123; 124 to 129; 178 to 183; 184 to 189; 190 to 195; 196 to 201; 202 to 207; 208 to 213; 214 to 219; and 220 to 225; listed in the order of CDR-H1, CDR-H2, CDR-H3, CDR-L1, CDR-L2, CDR-L3 sequence. Preferably the orientation of the CDRs is VH to VL, i.e. the orientation of the variable regions is from N- to C-terminus VH to VL.
Preferred VH and VL region sequence combinations of the CD3 binding domain comprised in the polypeptide or polypeptide construct of the invention, are found in SEQ ID NOs (listed in the order VH+VL sequence): 550+551; 552+553; 554+555; 556+557; 558+559; 560+561; 562+563; 564+565; 566+567; 568+569; 570+571; 572+573; 574+575; 576+577; 578+579; 580+581; 582+583; 584+585; 586+587; 588+589; 590+591; 592+593; 594+595; 596+597. Preferred CD3 binding domains are selected from SEQ ID NOs: 558+559; 560+561; 562+563; 564+565; 582+583; 584+585; 586+587; 588+589; 590+591; 592+593; 594+595; and 596+597.

[0081] In another preferred embodiment, the linker(s) linking the binding domains the polypeptide or polypeptide construct of the invention comprise(s) or consist(s) of S(G4X)n or (G4X)n, wherein X is selected from the group consisting of Q, T, N, C, G, A, V, I, L, and M, and wherein n is an integer selected from integers 1 to 20. As outlined herein above, it is advantageous if more than one of the linkers in the polypeptides or polypeptide constructs of the invention are as defined herein above. Hence, it is preferred that also the linkers connecting binding domains are as defined herein above. It is most preferred, that the linker(s) linking the binding domains as well as the linker(s) linking the VH and VL variable regions within the binding domains are S(G4Q)n or (G4Q)n linkers as defined herein, wherein said linkers substitute linkers that contain serine in place of glutamine, i.e. S(G4S)n or (G4S)n linkers.

[0082] Preferably, said linker linking the binding domains of the polypeptide or polypeptide construct of the invention is S(G4X)n, n is 1 and X is Q. In other terms, the linker linking the, preferably all, binding domains of the polypeptide or polypeptide construct of the invention is S(G4Q) (SEQ ID NO: 34).

[0083] In a further preferred embodiment, the polypeptide or polypeptide construct of the invention comprises a half-life extending domain. It is also envisaged that the polypeptide construct of the invention has, in addition to its function to bind to the said target antigen(s) (preferably, when the polypeptide or polypeptide construct comprises a CD3 binding domain and at least one further binding domain binding to a tumor antigen), a further function. In this format, the construct may be a trifunctional or multifunctional construct by targeting target cells through tumor antigen binding, mediating cytotoxic T cell activity through CD3 binding and providing a further function such as means or domains to enhance or extend serum half-life, a fully functional or modified Fc constant domain mediating cytotoxicity through recruitment of effector cells, a label (fluorescent etc.), a therapeutic agent such as a toxin or radionuclide, etc.

[0084] Examples for means or domains to extend serum half-life of the polypeptides/polypeptide constructs of the invention include peptides, proteins or domains of proteins, which are fused or otherwise attached to the polypeptides/polypeptide constructs. The group of peptides, proteins or protein domains includes peptides binding to other proteins with preferred pharmacokinetic profile in the human body such as serum albumin (see WO 2009/127691). An alternative concept of such half-life extending peptides includes peptides binding to the neonatal Fc receptor (FcRn, see WO 2007/098420), which can also be used in the constructs of the present invention. The concept of attaching larger domains of proteins or complete proteins includes the fusion of human serum albumin, variants or mutants of human serum albumin (see WO 2011/051489, WO 2012/059486, WO 2012/150319, WO 2013/135896, WO 2014/072481, WO 2013/075066) or domains thereof, as well as the fusion of an immunoglobulin constant region (Fc domain) and variants thereof. Such variants of Fc domains are called Fc-based domains and may e.g. be optimized/modified to allow the desired pairing of dimers or multimers, to abolish Fc receptor binding (e.g. to avoid ADCC or CDC) or for other reasons. A further concept known in the art to extend the half-life of substances or molecules in the human body is the pegylation of those molecules (such as the constructs of the present invention).

[0085] In one embodiment, the polypeptides/polypeptide constructs according to the invention are linked (e.g. via peptide bond) with a fusion partner (such as a protein, polypeptide or peptide), e.g. for extending the construct's serum half-life. These fusion partners can be selected from human serum albumin (“HSA” or “HALB”) as wells as sequence variants thereof, peptides binding to HSA, peptides binding to FcRn (“FcRn BP”), or constructs comprising an (antibody derived) Fc region. In general, the fusion partners may be linked to the N-terminus or to the C-terminus of the constructs according to the invention, either directly (e.g. via peptide bond) or through a peptide linker such as (GGGGQ)n, (GGGGS)n or GGGG (wherein “n” is an integer of 2 or greater, e.g. 2 or 3 or 4). Specific suitable peptide linkers are discussed above.

[0086] It is preferred that said half-life extending domain (HLE domain) is comprising, or consisting of, two polypeptide monomers with each monomer comprising a hinge, a CH2 domain and a CH3 domain, wherein said two polypeptide monomers are fused to each other via a peptide linker, comprising in an amino to carboxyl order: hinge-CH2-CH3-peptide linker-hinge-CH2-CH3. A preferred polypeptide monomer of said HLE domain comprises or consists of the sequence of SEQ ID NO: 78 or 79; wherein the sequence of the entire HLE domain is defined in SEQ ID NO: 849. The sequence of said HLE domain monomer is, preferably, modified by deletion of the “DKTHT” sequence motif at the N-terminus and/or by substitution of the amino acid D at position 55 of SEQ ID NO: 78 or 79 with amino acid E. Preferably, all modifications, i.e. the deletion of the DKTHT motif as well as said substitutions at positions 55 are present in each HLE domain monomer which are fused to each other via a peptide linker. It is preferred that said peptide linker is (GGGGQ)n, or (GGGGS)n (wherein “n” is an integer of 2 or greater, e.g. 2 or 3 or 4 or 5 or 6, preferred 6). A particularly preferred linker is (G4Q)6. Each of the latter features/modifications contributes to a further reduction of the clipping rate. Therefore, the combination of (G4Q)6 as linker fusing said HLE domain monomers modified by deletion of the “DKTHT” sequence motif at the N-terminus and by substitution of the amino acid D at position 55 of SEQ ID NO: 78 or 79 with amino acid E is a preferred embodiment of the invention (as in SEQ ID NOs: 80 and 81). A corresponding preferred HLE domain comprises or consists of the sequence defined in SEQ ID NO: 850.

[0087] In accordance with the invention, said polypeptide or polypeptide construct comprises in an amino to carboxyl order: Binding Domain 1 (VH/VL-Peptide Linker-VH/VL)-Linker-Binding Domain 2 (VH/VL-Peptide Linker-VH/VL)-HLE domain. The HLE domain is preferably linked to the polypeptide or polypeptide construct according to the invention through a peptide linker such as (GGGGQ)n, (GGGGS)n or GGGG (wherein “n” is an integer of 2 or greater, e.g. 2 or 3 or 4). More preferred, the linker is GGGG.

[0088] Also in accordance with the invention, said polypeptide or polypeptide construct comprises in an amino to carboxyl order: Binding Domain 1 (VH/VL-Peptide Linker-VH/VL)-Linker-Binding Domain 2 (VH/VL-Peptide Linker-VH/VL)-Linker-Binding Domain 3 (VH/VL-Peptide Linker-VH/VL)-HLE domain.

[0089] Further in accordance with the invention, said polypeptide or polypeptide construct comprises in an amino to carboxyl order: Binding Domain 1 (VH/VL-Peptide Linker-VH/VL)-Linker-Binding Domain 2 (VH/VL-Peptide Linker-VH/VL)-Linker-HLE domain-Linker-Binding Domain 3 (VH/VL-Peptide Linker-VH/VL)-Linker-Binding Domain 4 (VH/VL-Peptide Linker-VH/VL), wherein Binding Domain 1 binds to a first cell surface antigen, Binding domains 2 and 3 bind to CD3, wherein Binding Domain 4 binds to a second cell surface antigen. It is further preferred that the peptide linkers within the binding domains is (G4Q)3 and the peptide linker within the HLE domain is (G4Q)6, the linker linking said binding domains is S(G4Q), and wherein the linkers linking the HLE domain to the binding domains are G4 linkers. It is even further preferred that the HLE domain comprises or consist of the sequence of SEQ ID NO: 850. It is further preferred that the binding domains binding to CD3 comprise or consist of the VH and VL sequence as defined in SEQ ID NOs: 582 and 583, 584 and 585, 586 and 587, or 588 and 589.

[0090] In accordance with the invention, the linkers linking the HLE domain to the binding domains are G4 linkers in the polypeptide or polypeptide construct of the invention.

[0091] In accordance with the foregoing, it is thus envisaged that a polypeptide or polypeptide construct according to the present invention comprises a single chain polypeptide that is at least bispecific with at least one binding domain binding to CD3 and at least one binding domain binding to a cell surface antigen, preferably a tumor antigen, optionally with an HLE domain, wherein said polypeptide comprises or consists of in the following order from N-terminus to C-terminus:
[0092] a) VL (comprising part of a cell surface antigen binding domain/paratope)-(G4Q)3-VH (comprising part of a cell surface antigen binding domain/paratope)-Peptide linker (SG4Q)-VH (comprising part of the CD3epsilon binding domain/paratope)-(G4Q)3-VL (comprising part of the CD3epsilon binding domain/paratope);
[0093] b) VH (comprising part of a cell surface antigen binding domain/paratope)-(G4Q)3-VL (comprising part of a cell surface antigen binding domain/paratope)-Peptide linker (SG4Q)-VH (comprising part of the CD3epsilon binding domain/paratope)-(G4Q)3-VL (comprising part of the CD3epsilon binding domain/paratope);
[0094] c) VL (comprising part of a cell surface antigen binding domain/paratope)-(G4Q)3-VH (comprising part of a cell surface antigen binding domain/paratope)-Peptide linker (SG4Q)-VH (comprising part of the CD3epsilon binding domain/paratope)-(G4Q)3-VL (comprising part of the CD3epsilon binding domain/paratope)-Peptide linker (G4)-Fc monomer (part of the preferred HLE domain described herein above)-(G4Q)6-Fc monomer (complementary part of the preferred HLE domain described herein above);
[0095] d) VH (comprising part of a cell surface antigen binding domain/paratope)-(G4Q)3-VL (comprising part of a cell surface antigen binding domain/paratope)-Peptide linker (SG4Q)-VH (comprising part of the CD3epsilon binding domain/paratope)-(G4Q)3-VL (comprising part of the CD3epsilon binding domain/paratope)-Peptide linker (G4)-Fc monomer (part of the HLE domain)-(G4Q)6-Fc monomer (part of the HLE domain);
[0096] e) VH (comprising part of a first cell surface antigen binding domain/paratope)-((G4Q)3-VL (comprising part of a first cell surface antigen binding domain/paratope)-Peptide linker (SG4Q)-VL (comprising part of a second cell surface antigen binding domain/paratope)-(G4Q)3-VH (comprising part of a second cell surface antigen binding domain/paratope)-Peptide linker (SG4Q)-VH (comprising part of the CD3epsilon binding domain/paratope)-(G4Q)3-VL (comprising part of the CD3epsilon binding domain/paratope)-Peptide linker (G4)-Fc monomer (part of the HLE domain)-(G4Q)6 or -Fc monomer (part of the HLE domain);
[0097] f) VH (comprising part of a first cell surface antigen binding domain/paratope)-(G4Q)3-VL (comprising part of a first cell surface antigen binding domain/paratope)-Peptide linker (SG4Q)-VH (comprising part of a second cell surface antigen binding domain/paratope)-(G4Q)3-VL (comprising part of a second cell surface antigen binding domain/paratope)-Peptide linker (SG4Q)-VH (comprising part of the CD3epsilon binding domain/paratope)-(G4Q)3-VL (comprising part of the CD3epsilon binding domain/paratope)-Peptide linker (G4)-Fc monomer (part of the HLE domain)-(G4Q)6 or -Fc monomer (part of the HLE domain);
[0098] g) VL (comprising part of a first cell surface antigen binding domain/paratope)-(G4Q)3-VH (comprising part of a first cell surface antigen binding domain/paratope)-Peptide linker (SG4Q)-VL (comprising part of a second cell surface antigen binding domain/paratope)-(G4Q)3-VH (comprising part of a second cell surface antigen binding domain/paratope)-Peptide linker (SG4Q)-VH (comprising part of the CD3epsilon binding domain/paratope)-(G4Q)3-VL (comprising part of the CD3epsilon binding domain/paratope)-Peptide linker (G4)-Fc monomer (part of the HLE domain)-(G4Q)6 or -Fc monomer (part of the HLE domain)
[0099] h) VL (comprising part of a first cell surface antigen binding domain/paratope)-(G4Q)3-VH (comprising part of a first cell surface antigen binding domain/paratope)-Peptide linker (SG4Q)-VH (comprising part of a second cell surface antigen binding domain/paratope)-(G4Q)3-VL (comprising part of a second cell surface antigen binding domain/paratope)-Peptide linker (SG4Q)-VH (comprising part of the CD3epsilon binding domain/paratope)-(G4Q)3-VL (comprising part of the CD3epsilon binding domain/paratope)-Peptide linker (G4)-Fc monomer (part of the HLE domain)-(G4Q)6 or -Fc monomer (part of the HLE domain); or
[0100] i) Binding domain 1 ((VL (comprising part of a first cell surface antigen binding domain/paratope)-(G4Q)3-VH (comprising part of a first cell surface antigen binding domain/paratope)) or (VH (comprising part of a first cell surface antigen binding domain/paratope)-(G4Q)3-VL (comprising part of a first cell surface antigen binding domain/paratope)))-Peptide linker (G4Q)-CD3 binding domain 1 (VH (comprising part of a first CD3epsilon binding domain/paratope)-(G4Q)3-VL (comprising part of a first CD3epsilon binding domain/paratope))-Peptide linker (G4)-Fc monomer (part of the HLE domain)-(G4Q)6-Fc monomer (part of the HLE domain)-Peptide linker (G4)-Binding domain 2 ((VL (comprising part of a second cell surface antigen binding domain/paratope)-(G4Q)3-VH (comprising part of a first cell surface antigen binding domain/paratope)) or (VH (comprising part of a second cell surface antigen binding domain/paratope)-(G4Q)3-VL (comprising part of a second cell surface antigen binding domain/paratope)))-Peptide linker (G4Q)-CD3 binding domain 2 (VH (comprising part of a second CD3epsilon binding domain/paratope)-(G4Q)3-VL (comprising part of a second CD3epsilon binding domain/paratope)).

[0101] As is evident from the above, the VH and VL region sequence orientation of the binding domain(s) of the cell surface antigen can be VH-VL or VL-VH. Preferably, the cell surface antigen is a tumor antigen as detailed herein below. The HLE domain sequences made up of the Fc monomers and connecting linkers as detailed herein are preferably selected from the sequences as defined in SEQ ID NOs: 80, 81, 72, respectively, wherein a preferred HLE domain sequence is as defined in SEQ ID NO: 850. The two CD3 binding domains of the polypeptide construct of item i) are preferably the same CD3 binding domains, such as, preferably, the CD3 binding domain with VH and VL region sequences of SEQ ID NOs: 582+583; 584+585; 586+587; and 588+589; preferably the CD3 binding domain as defined in SEQ ID NOs: 722 to 725, wherein 724 and 725 are even more preferred since they have a (G4Q)3 linker linking the VH and the VL region. While peptide linkers (SG4Q) are preferred at the indicated positions, they can also be replaced by (G4Q) linkers or SG4S linkers.

[0102] In a further preferred embodiment, where the VL region is preceded by the VH region in the cell surface antigen, preferably tumor antigen binding domain in a polypeptide or polypeptide construct of the invention, it is preferred that the amino acids “EI” are present prior to the VL region and before the linker linking the VH to the VL region as a further means to decrease the clipping rate of the polypeptide or polypeptide construct of the invention. The sequence listing comprises corresponding binding domains alone or as part of longer polypeptides or polypeptide constructs of the invention.

[0103] Covalent modifications of the polypeptides/polypeptide constructs are also included within the scope of this invention, and are generally, but not always, done post-translationally. For example, several types of covalent modifications of the construct are introduced into the molecule by reacting specific amino acid residues of the construct with an organic derivatizing agent that can react with selected side chains or with the N- or C-terminal residues. Derivatization with bifunctional agents is useful for crosslinking the constructs of the present invention to a water-insoluble support matrix or surface for use in a variety of methods. Glutaminyl and asparaginyl residues are frequently deamidated to the corresponding glutamyl and aspartyl residues, respectively. Alternatively, these residues are deamidated under mildly acidic conditions. Either form of these residues falls within the scope of this invention. Other modifications include hydroxylation of proline and lysine, phosphorylation of hydroxyl groups of seryl or threonyl residues, methylation of the α-amino groups of lysine, arginine, and histidine side chains (T. E. Creighton, Proteins: Structure and Molecular Properties, W. H. Freeman & Co., San Francisco, 1983, pp. 79-86), acetylation of the N-terminal amine, and amidation of any C-terminal carboxyl group.

[0104] Another type of covalent modification of the constructs included within the scope of this invention comprises altering the glycosylation pattern of the protein. As is known in the art, glycosylation patterns can depend on both the sequence of the protein (e.g., the presence or absence of specific glycosylation amino acid residues, discussed below), or the host cell or organism in which the protein is produced. Specific expression systems are discussed below. Glycosylation of polypeptides is typically either N-linked or O-linked. N-linked refers to the attachment of the carbohydrate moiety to the side chain of an asparagine residue. The tri-peptide sequences asparagine-X-serine and asparagine-X-threonine, where X is any amino acid except proline, are the recognition sequences for enzymatic attachment of the carbohydrate moiety to the asparagine side chain. Thus, the presence of either of these tri-peptide sequences in a polypeptide creates a potential glycosylation site. O-linked glycosylation refers to the attachment of one of the sugars N-acetylgalactosamine, galactose, or xylose, to a hydroxyamino acid, most commonly serine or threonine, although 5-hydroxyproline or 5-hydroxylysine may also be used.

[0105] Addition of glycosylation sites to the construct is conveniently accomplished by altering the amino acid sequence such that it contains one or more of the above-described tri-peptide sequences (for N-linked glycosylation sites). The alteration may also be made by the addition of, or substitution by, one or more serine or threonine residues to the starting sequence (for O-linked glycosylation sites). For ease, the amino acid sequence of a construct may be altered through changes at the DNA level, particularly by mutating the DNA encoding the polypeptide at preselected bases such that codons are generated that will translate into the desired amino acids.

[0106] Another means of increasing the number of carbohydrate moieties on the construct is by chemical or enzymatic coupling of glycosides to the protein. These procedures are advantageous in that they do not require production of the protein in a host cell that has glycosylation capabilities for N- and O-linked glycosylation. Depending on the coupling mode used, the sugar(s) may be attached to (a) arginine and histidine, (b) free carboxyl groups, (c) free sulfhydryl groups such as those of cysteine, (d) free hydroxyl groups such as those of serine, threonine, or hydroxyproline, (e) aromatic residues such as those of phenylalanine, tyrosine, or tryptophan, or (f) the amide group of glutamine. These methods are described in WO 87/05330, and in Aplin and Wriston, 1981, CRC Crit. Rev. Biochem., pp. 259-306.

[0107] Removal of carbohydrate moieties present on the starting construct may be accomplished chemically or enzymatically. Chemical deglycosylation requires exposure of the protein to the compound trifluoromethanesulfonic acid, or an equivalent compound. This treatment results in the cleavage of most or all sugars except the linking sugar (N-acetylglucosamine or N-acetylgalactosamine), while leaving the polypeptide intact. Chemical deglycosylation is described by Hakimuddin et al., 1987, Arch. Biochem. Biophys. 259:52 and by Edge et al., 1981, Anal. Biochem. 118:131. Enzymatic cleavage of carbohydrate moieties on polypeptides can be achieved using a variety of endo- and exo-glycosidases as described by Thotakura et al., 1987, Meth. Enzymol. 138:350. Glycosylation at potential glycosylation sites may be prevented using the compound tunicamycin as described by Duskin et al., 1982, J. Biol. Chem. 257:3105. Tunicamycin blocks the formation of protein-N-glycoside linkages.

[0108] Other modifications of the construct are also contemplated herein. For example, another type of covalent modification of the construct comprises linking the construct to various non-proteinaceous polymers, including polyols, in the manner set forth in U.S. Pat. Nos. 4,640,835; 4,496,689; 4,301,144; 4,670,417; 4,791,192 or 4,179,337. In addition, as is known in the art, amino acid substitutions may be made in various positions within the construct, e.g. to facilitate the addition of polymers such as polyethylene glycol (PEG).

[0109] In some embodiments, the covalent modification of the constructs of the invention comprises the addition of one or more labels. The labelling group may be coupled to the construct via spacer arms of various lengths to reduce potential steric hindrance. Various methods for labelling proteins are known in the art and can be used in performing the present invention. The term “label” or “labelling group” refers to any detectable label. In general, labels fall into a variety of classes, depending on the assay in which they are to be detected—the following examples include, but are not limited to:
[0110] a) isotopic labels, which may be radioactive or heavy isotopes, such as radioisotopes or radionuclides (e.g., ³H, ¹⁴C, ¹⁵N, ³⁵S, ⁸⁹Zr, ⁹⁰Y, ⁹⁹Tc, ¹¹¹In, ¹²⁵I, ¹³¹I)
[0111] b) magnetic labels (e.g., magnetic particles)
[0112] c) redox active moieties
[0113] d) optical dyes (including, but not limited to, chromophores, phosphors and fluorophores) such as fluorescent groups (e.g., FITC, rhodamine, lanthanide phosphors), chemiluminescent groups, and fluorophores which can be either “small molecule” fluores or proteinaceous fluores
[0114] e) enzymatic groups (e.g. horseradish peroxidase, β-galactosidase, luciferase, alkaline phosphatase)
[0115] f) biotinylated groups
[0116] g) predetermined polypeptide epitopes recognized by a secondary reporter (e.g., leucine zipper pair sequences, binding sites for secondary antibodies, metal binding domains, epitope tags, etc.).

[0117] By “fluorescent label” is meant any molecule that may be detected via its inherent fluorescent properties. Suitable fluorescent labels include, but are not limited to, fluorescein, rhodamine, tetramethylrhodamine, eosin, erythrosin, coumarin, methyl-coumarins, pyrene, Malacite green, stilbene, Lucifer Yellow, Cascade BlueJ, Texas Red, IAEDANS, EDANS, BODIPY FL, LC Red 640, Cy 5, Cy 5.5, LC Red 705, Oregon green, the Alexa-Fluor dyes (Alexa Fluor 350, Alexa Fluor 430, Alexa Fluor 488, Alexa Fluor 546, Alexa Fluor 568, Alexa Fluor 594, Alexa Fluor 633, Alexa Fluor 660, Alexa Fluor 680), Cascade Blue, Cascade Yellow and R-phycoerythrin (PE) (Molecular Probes, Eugene, OR), FITC, Rhodamine, and Texas Red (Pierce, Rockford, IL), Cy5, Cy5.5, Cy7 (Amersham Life Science, Pittsburgh, PA). Suitable optical dyes, including fluorophores, are described in Molecular Probes Handbook by Richard P. Haugland.

[0118] Suitable proteinaceous fluorescent labels also include, but are not limited to, green fluorescent protein, including a Renilla, Ptilosarcus, or Aequorea species of GFP (Chalfie et al., 1994, Science 263:802-805), EGFP (Clontech Laboratories, Inc., Genbank® Accession Number U55762), blue fluorescent protein (BFP, Quantum Biotechnologies, Inc. 1801 de Maisonneuve Blvd. West, 8th Floor, Montreal, Quebec, Canada H3H 1J9; Stauber, 1998, Biotechniques 24:462-471; Heim et al., 1996, Curr. Biol. 6:178-182), enhanced yellow fluorescent protein (EYFP, Clontech Laboratories, Inc.), luciferase (Ichiki et al., 1993, J. Immunol. 150:5408-5417), β galactosidase (Nolan et al., 1988, Proc. Natl. Acad. Sci. U.S.A. 85:2603-2607) and Renilla (WO92/15673, WO95/07463, WO98/14605, WO98/26277, WO99/49019, U.S. Pat. Nos. 5,292,658; 5,418,155; 5,683,888; 5,741,668; 5,777,079; 5,804,387; 5,874,304; 5,876,995; 5,925,558).

[0119] Leucine zipper domains are peptides that promote oligomerization of the proteins in which they are found. Leucine zippers were originally identified in several DNA-binding proteins (Landschulz et al., 1988, Science 240:1759), and have since been found in a variety of different proteins. Among the known leucine zippers are naturally occurring peptides and derivatives thereof that dimerize or trimerize. Examples of leucine zipper domains suitable for producing soluble oligomeric proteins are described in PCT application WO 94/10308, and the leucine zipper derived from lung surfactant protein D (SPD) described in Hoppe et al., 1994, FEBS Letters 344:191. The use of a modified leucine zipper that allows for stable trimerization of a heterologous protein fused thereto is described in Fanslow et al., 1994, Semin. Immunol. 6:267-78.

[0120] The polypeptide construct of the invention may also comprise additional domains, which are e.g. helpful in the isolation of the molecule or relate to an adapted pharmacokinetic profile of the molecule. Domains helpful for the isolation of a construct may be selected from peptide motives or secondarily introduced moieties, which can be captured in an isolation method, e.g. an isolation column. Non-limiting embodiments of such additional domains comprise peptide motives known as Myc-tag, HAT-tag, HA-tag, TAP-tag, GST-tag, chitin binding domain (CBD-tag), maltose binding protein (MBP-tag), Flag-tag, Strep-tag and variants thereof (e.g. StrepII-tag) and His-tag. All herein disclosed constructs characterized by the identified CDRs may comprise a His-tag domain, which is generally known as a repeat of consecutive His residues in the amino acid sequence of a molecule, e.g. of five His residues, or of six His residues (hexa-histidine). The His-tag may be located e.g. at the N- or C-terminus of the construct. In one embodiment, a hexa-histidine tag (HHHHHH) is linked via peptide bond to the C-terminus of the construct according to the invention. A histidine tag is preferred, especially a 6×His tag.

[0121] In accordance with the invention, it is preferred when the polypeptide or polypeptide construct of the invention comprises at further binding domain, i.e. is at least bispecific, that said cell surface antigen to which the target antigen binding domain binds is a tumor antigen. Preferably, the polypeptide or polypeptide construct of the invention is a T cell engager. Accordingly, it is preferred that the polypeptide or polypeptide construct of the invention comprises at least a CD3 binding domain and a tumor antigen binding domain.

[0122] In a preferred embodiment, the tumor antigen is selected from the group consisting of BCMA (B-cell maturation antigen), CD123 (interleukin-3 receptor alpha chain (IL-3R)), CD19 (B-lymphocyte antigen CD19), CD20 (B-lymphocyte antigen CD20), CD22 (cluster of differentiation-22), CD33 (Siglec-3), CD70 (Cluster of Differentiation 70), CDH19 (Cadherin 19), CDH3 (Cadherin 3), CLL1 (C-type lectin domain family 12 member A), CS1 (CCND3 subset 1), CLDN6 (Claudin-6), CLDN18.2 (Claudin 18.2), DLL3 (Delta-like ligand 3), EGFRvIII (Epidermal growth factor receptor vIII), FLT3 (fms like tyrosine kinase 3), MAGEB2 (Melanoma-associated antigen B2), MART1 (Melanoma Antigen Recognized By T-Cells 1), MSLN (Mesothelin), MUC17 (Mucin-17), PSMA (prostate-specific membrane antigen), and STEAP1 (Metalloreductase STEAP1). These tumor antigens are well known in the art due to their expression on tumor cells.

[0123] Preferred CDR sequences and VH/VL region sequences and combinations thereof for BCMA binding domains as binding domains of the polypeptide or polypeptide construct of the invention, and bispecific single chain molecule sequences of a polypeptide or polypeptide construct in accordance with the invention having a BCMA binding domain as binding domain are defined in SEQ ID NOs: 238 to 243; 244 to 249; 602+603; 604+605; 732; 733; 784; 794.

[0124] Preferred CDR sequences and VH/VL region sequences and combinations thereof for CD123 binding domains as binding domains of the polypeptide or polypeptide construct of the invention, and bispecific single chain molecule sequences of a polypeptide or polypeptide construct in accordance with the invention having a CD123 binding domain as binding domain are defined in SEQ ID NOs: 250 to 255; 256 to 261; 608+609; 735.

[0125] Preferred CDR sequences and VH/VL region sequences and combinations thereof for CD19 binding domains as binding domains of the polypeptide or polypeptide construct of the invention, and bispecific single chain molecule sequences of a polypeptide or polypeptide construct in accordance with the invention having a CD19 binding domain as binding domain are defined in SEQ ID NOs:268 to 273; 612+613; 737; 797.

[0126] Preferred CDR sequences and VH/VL region sequences and combinations thereof for CD33 binding domains as binding domains of the polypeptide or polypeptide construct of the invention, and bispecific single chain molecule sequences of a polypeptide or polypeptide construct in accordance with the invention having a CD33 binding domain as binding domain are defined in SEQ ID NOs: 286 to 291; 298 to 303; 304 to 309; 618+619; 622+623; 624+625; 740; 742; 743; 786; 799.

[0127] Preferred CDR sequences and VH/VL region sequences and combinations thereof for CD70 binding domains as binding domains of the polypeptide or polypeptide construct of the invention, and bispecific single chain molecule sequences of a polypeptide or polypeptide construct in accordance with the invention having a CD70 binding domain as binding domain are defined in SEQ ID NOs: 316 to 321; 628+629; 745; 801.

[0128] Preferred CDR sequences and VH/VL region sequences and combinations thereof for CDH19 binding domains as binding domains of the polypeptide or polypeptide construct of the invention, and bispecific single chain molecule sequences of a polypeptide or polypeptide construct in accordance with the invention having a CDH19 binding domain as binding domain are defined in SEQ ID NOs: 328 to 333; 632+633; 747; 803.

[0129] Preferred CDR sequences and VH/VL region sequences and combinations thereof for CDH3 binding domains as binding domains of the polypeptide or polypeptide construct of the invention, and bispecific single chain molecule sequences of a polypeptide or polypeptide construct in accordance with the invention having a CDH3 binding domain as binding domain are defined in SEQ ID NOs: 340 to 345; 346 to 351; 358 to 363; 642+643; 749; 750; 752; 805; 844; 846.

[0130] Preferred CDR sequences and VH/VL region sequences and combinations thereof for CLDN18.2 binding domains as binding domains of the polypeptide or polypeptide construct of the invention, and bispecific single chain molecule sequences of a polypeptide or polypeptide construct in accordance with the invention having a CLDN18.2 binding domain as binding domain are defined in SEQ ID NOs: 370 to 375; 646+647; 754; 812.

[0131] Preferred CDR sequences and VH/VL region sequences and combinations thereof for CLL1 binding domains as binding domains of the polypeptide or polypeptide construct of the invention, and bispecific single chain molecule sequences of a polypeptide or polypeptide construct in accordance with the invention having a CLL1 binding domain as binding domain are defined in SEQ ID NOs: 328 to 387; 650+651; 756; 806.

[0132] Preferred CDR sequences and VH/VL region sequences and combinations thereof for CLDN6 binding domains as binding domains of the polypeptide or polypeptide construct of the invention, and bispecific single chain molecule sequences of a polypeptide or polypeptide construct in accordance with the invention having a CLDN6 binding domain as binding domain are defined in SEQ ID NOs: 394 to 399; 654+655; 758; 810.

[0133] Preferred CDR sequences and VH/VL region sequences and combinations thereof for CS1 binding domains as binding domains of the polypeptide or polypeptide construct of the invention, and bispecific single chain molecule sequences of a polypeptide or polypeptide construct in accordance with the invention having a CS1 binding domain as binding domain are defined in SEQ ID NOs: 412 to 417; 660+661; 761; 839; 840.

[0134] Preferred CDR sequences and VH/VL region sequences and combinations thereof for DLL3 binding domains as binding domains of the polypeptide or polypeptide construct of the invention, and bispecific single chain molecule sequences of a polypeptide or polypeptide construct in accordance with the invention having a DLL3 binding domain as binding domain are defined in SEQ ID NOs: 424 to 429; 664+665; 763; 814.

[0135] Preferred CDR sequences and VH/VL region sequences and combinations thereof for EGFRvIII binding domains as binding domains of the polypeptide or polypeptide construct of the invention, and bispecific single chain molecule sequences of a polypeptide or polypeptide construct in accordance with the invention having a EGFRvIII binding domain as binding domain are defined in SEQ ID NOs: 436 to 441; 668+669; 765; 789.

[0136] Preferred CDR sequences and VH/VL region sequences and combinations thereof for FLT3 binding domains as binding domains of the polypeptide or polypeptide construct of the invention, and bispecific single chain molecule sequences of a polypeptide or polypeptide construct in accordance with the invention having a FLT3 binding domain as binding domain are defined in SEQ ID NOs: 448 to 453; 672+673; 767; 818; 843.

[0137] Preferred CDR sequences and VH/VL region sequences and combinations thereof for MAGEB2 binding domains as binding domains of the polypeptide or polypeptide construct of the invention, and bispecific single chain molecule sequences of a polypeptide or polypeptide construct in accordance with the invention having a MAGEB2 binding domain as binding domain are defined in SEQ ID NOs: 460 to 465; 472 to 477; 676+677; 680+681; 769; 771; 823; 825.

[0138] Preferred CDR sequences and VH/VL region sequences and combinations thereof for MSLN binding domains as binding domains of the polypeptide or polypeptide construct of the invention, and bispecific single chain molecule sequences of a polypeptide or polypeptide construct in accordance with the invention having a MSLN binding domain as binding domain are defined in SEQ ID NOs: 484 to 489; 490 to 495; 502 to 507; 684+685; 686+687; 690+691; 773; 774; 776; 827.

[0139] Preferred CDR sequences and VH/VL region sequences and combinations thereof for MUC17 binding domains as binding domains of the polypeptide or polypeptide construct of the invention, and bispecific single chain molecule sequences of a polypeptide or polypeptide construct in accordance with the invention having a MUC17 binding domain as binding domain are defined in SEQ ID NOs: 514 to 519; 694+695; 778; 829.

[0140] Preferred CDR sequences and VH/VL region sequences and combinations thereof for PSMA binding domains as binding domains of the polypeptide or polypeptide construct of the invention, and bispecific single chain molecule sequences of a polypeptide or polypeptide construct in accordance with the invention having a PSMA binding domain as binding domain are defined in SEQ ID NOs: 532 to 537; 538 to 543; 544 to 549; 700+701; 702+703; 781; 782; 783; 790; 831.

[0141] The invention also relates to a method for improving stability of a polypeptide or polypeptide construct comprising a first target antigen binding domain, wherein said first target antigen binding domain comprises a VH and a VL variable region linked by a peptide linker, wherein the peptide linker comprises or consists of S(G4S)n and (G4S)n, wherein n is an integer selected from integers 1 to 20, comprising the step of substituting said S(G4S)n or (G4S)n linker with a peptide linker, wherein the peptide linker comprises or consists of S(G4X)n or (G4X)n, wherein X is selected from the group consisting of Q, T, N, C, G, A, V, I, L, and M, and wherein n is an integer selected from integers 1 to 20. In a preferred embodiment of the method of the invention, integer n is 1, 2, 3, 4, 5 or 6. In accordance with the invention, the X in S(G4X)n or (G4X)n is preferably Q. As such, the peptide linker is S(G4Q)n or (G4Q)n. In a preferred embodiment, the peptide linker is (G4X)n, n is 3, and X is Q. Hence, the peptide linker has the format of (G4Q)3. All preferred embodiments described herein above in relation to the polypeptide or polypeptide construct of the invention also apply to the method for improving stability. As such, the method of the invention can be used to improve the stability of any of the herein recited polypeptides or polypeptide constructs, when said polypeptides or polypeptide constructs comprise S(G4S)n and (G4S)n linkers, that are then substituted with said peptide linker, wherein the peptide linker comprises or consists of S(G4X)n or (G4X)n, wherein X is selected from the group consisting of Q, T, N, C, G, A, V, I, L, and M, and wherein n is an integer selected from integers 1 to 20, according to the method of the invention. More concretely, the invention relates to a method for improving the stability of a polypeptide or polypeptide in the format: Binding Domain 1 (VH/VL-Peptide Linker-VH/VL)-Linker-Binding Domain 2 (VH/VL-Peptide Linker-VH/VL); Binding Domain 1 (VH/VL-Peptide Linker-VH/VL)-Linker-Binding Domain 2 (VH/VL-Peptide Linker-VH/VL)-HLE domain (in amino to carboxyl order); Binding Domain 1 (VH/VL-Peptide Linker-VH/VL)-Linker-Binding Domain 2 (VH/VL-Peptide Linker-VH/VL)-Linker-Binding Domain 3 (VH/VL-Peptide Linker-VH/VL)-HLE domain (in amino to carboxyl order); or Binding Domain 1 (VH/VL-Peptide Linker-VH/VL)-Linker-Binding Domain 2 (VH/VL-Peptide Linker-VH/VL)-Linker-HLE domain-Linker-Binding Domain 3 (VH/VL-Peptide Linker-VH/VL)-Linker-Binding Domain 4 (VH/VL-Peptide Linker-VH/VL) (in amino to carboxyl order), wherein the peptide linker linking the VH and VL region, the linker linking the binding domains or the linker within the HLE domain (said HLE domain as defined herein above) comprises or consists of S(G4S)n and (G4S)n, wherein n is an integer selected from integers 1 to 20, comprising the step of substituting said S(G4S)n or (G4S)n linker with a peptide linker, wherein the peptide linker comprises or consists of S(G4X)n or (G4X)n, wherein X is selected from the group consisting of Q, T, N, C, G, A, V, I, L, and M, and wherein n is an integer selected from integers 1 to 20. In a preferred embodiment of the method of the invention, integer n is 1, 2, 3, 4, 5 or 6. In accordance with the invention, the X in S(G4X)n or (G4X)n is preferably Q. As such, the peptide linker is S(G4Q)n or (G4Q)n. Preferred linkers for each position of the different formats of the polypeptides or polypeptide construct formats are described herein above in relation to the polypeptide or polypeptide constructs of the invention which also apply to this embodiment.

[0142] “Improving stability” as used herein relates to a reduction in the clipping rate. Hence the method can also be termed a method for reducing the clipping rate of a polypeptide or polypeptide construct comprising a first target antigen binding domain, wherein said first target antigen binding domain comprises a VH and a VL variable region linked by a peptide linker, wherein the peptide linker comprises or consists of S(G4S)n and (G4S)n, wherein n is an integer selected from integers 1 to 20. A preferred method for determining the clipping rate is described in the examples.

[0143] The invention also relates to a polynucleotide encoding a polypeptide or polypeptide construct of the invention. Nucleic acid molecules are biopolymers composed of nucleotides. A polynucleotide is a biopolymer composed of 13 or more nucleotide monomers covalently bonded in a chain. DNA (such as cDNA) and RNA (such as mRNA) are examples of polynucleotides/nucleic acid molecules with distinct biological function. Nucleotides are organic molecules that serve as the monomers or subunits of nucleic acid molecules like DNA or RNA. The nucleic acid molecule or polynucleotide of the present invention can be double stranded or single stranded, linear or circular. It is envisaged that the nucleic acid molecule or polynucleotide is comprised in a vector. It is furthermore envisaged that such vector is comprised in a host cell. Said host cell is, e.g. after transformation or transfection with the vector or the polynucleotide/nucleic acid molecule of the invention, capable of expressing the construct. For this purpose, the polynucleotide or nucleic acid molecule is operatively linked with control sequences.

[0144] The genetic code is the set of rules by which information encoded within genetic material (nucleic acids) is translated into proteins. Biological decoding in living cells is accomplished by the ribosome which links amino acids in an order specified by mRNA, using tRNA molecules to carry amino acids and to read the mRNA three nucleotides at a time. The code defines how sequences of these nucleotide triplets, called codons, specify which amino acid will be added next during protein synthesis. With some exceptions, a three-nucleotide codon in a nucleic acid sequence specifies a single amino acid. Because the vast majority of genes are encoded with exactly the same code, this particular code is often referred to as the canonical or standard genetic code.

[0145] Degeneracy of codons is the redundancy of the genetic code, exhibited as the multiplicity of three-base pair codon combinations that specify an amino acid. Degeneracy results because there are more codons than encodable amino acids. The codons encoding one amino acid may differ in any of their three positions; however, often this difference is in the second or third position. For instance, codons GAA and GAG both specify glutamic acid and exhibit redundancy; but, neither specifies any other amino acid nor thus demonstrate ambiguity. The genetic codes of different organisms can be biased towards using one of the several codons that encode the same amino acid over the others—that is, a greater frequency of one will be found than expected by chance. For example, leucine is specified by six distinct codons, some of which are rarely used. Codon usage tables detailing genomic codon usage frequencies for most organisms are available. Recombinant gene technologies commonly take advantage of this effect by implementing a technique termed codon optimization, in which those codons are used to design a polynucleotide which are preferred by the respective host cell (such as a cell of human hamster origin, an Escherichia coli cell, or a Saccharomyces cerevisiae cell), e.g. to increase protein expression. It is hence envisaged that the polynucleotides/nucleic acid molecules of the present disclosure are codon optimized. Nevertheless, the polynucleotide/nucleic acid molecule encoding a construct of the invention may be designed using any codon that encodes the desired amino acid.

[0146] According to one embodiment, the polynucleotide/nucleic acid molecule of the present invention encoding the polypeptide construct of the invention is in the form of one single molecule or in the form of two or more separate molecules. If the construct of the present invention is a single chain construct, the polynucleotide/nucleic acid molecule encoding such construct will most likely also be in the form of one single molecule. However, it is also envisaged that different components of the polypeptide construct (such as the different domains, e.g. the paratope (antigen-binding (epitope-binding) structure)-comprising domain which binds to a cell surface antigen, the paratope (antigen-binding (epitope-binding) structure)-comprising domain which binds to CD3, and/or further domains such as antibody constant domains) are located on separate polypeptide chains, in which case the polynucleotide/nucleic acid molecule is most likely in the form of two or more separate molecules.

[0147] The same applies for the vector comprising a polynucleotide/nucleic acid molecule of the present invention. If the construct of the present invention is a single chain construct, one vector may comprise the polynucleotide which encodes the construct in one single location (as one single open reading frame, ORF). One vector may also comprise two or more polynucleotides/nucleic acid molecules at separate locations (with individual ORFs), each one of them encoding a different component of the construct of the invention. It is envisaged that the vector comprising the polynucleotide/nucleic acid molecule of the present invention is in the form of one single vector or two or more separate vectors. In one embodiment, and for the purpose of expressing the construct in a host cell, the host cell of the invention should comprise the polynucleotide/nucleic acid molecule encoding the construct or the vector comprising such polynucleotide/nucleic acid molecule in their entirety, meaning that all components of the construct—whether encoded as one single molecule or in separate molecules/locations—will assemble after translation and form together the biologically active construct of the invention.

[0148] The invention further relates to a vector comprising a polynucleotide/nucleic acid molecule of the invention. A vector is a nucleic acid molecule used as a vehicle to transfer (foreign) genetic material into a cell, usually to ensure the replication and/or expression of the genetic material. The term “vector” encompasses—but is not restricted to—plasmids, viruses, cosmids, and artificial chromosomes. Some vectors are designed specifically for cloning (cloning vectors), others for protein expression (expression vectors). So-called transcription vectors are mainly used to amplify their insert. The manipulation of DNA is normally conducted on E. coli vectors, which contain elements necessary for their maintenance in E. coli. However, vectors may also have elements that allow them to be maintained in another organism such as yeast, plant or mammalian cells, and these vectors are called shuttle vectors. Insertion of a vector into the target or host cell is usually called transformation for bacterial cells and transfection for eukaryotic cells, while insertion of a viral vector is often called transduction.

[0149] In general, engineered vectors comprise an origin of replication, a multicloning site and a selectable marker. The vector itself is generally a nucleotide sequence, commonly a DNA sequence, that comprises an insert (transgene) and a larger sequence that serves as the “backbone” of the vector. While the genetic code determines the polypeptide sequence for a given coding region, other genomic regions can influence when and where these polypeptides are produced. Modern vectors may therefore encompass additional features besides the transgene insert and a backbone: promoter, genetic marker, antibiotic resistance, reporter gene, targeting sequence, protein purification tag. Vectors called expression vectors (expression constructs) specifically are for the expression of the transgene in the target cell, and generally have control sequences.

[0150] The term “control sequences” refers to DNA sequences necessary for the expression of an operably linked coding sequence in a specific host organism. The control sequences that are suitable for prokaryotes, for example, include a promoter, optionally an operator sequence, and a ribosome binding site. Eukaryotic cells are known to utilize promoters, polyadenylation signals, a Kozak sequence and enhancers.

[0151] A nucleic acid is “operably linked” when it is placed into a functional relationship with another nucleic acid sequence. For example, DNA for a presequence or secretory leader is operably linked to DNA for a polypeptide if it is expressed as a preprotein that participates in the secretion of the polypeptide; a promoter or enhancer is operably linked to a coding sequence if it affects the transcription of the sequence; or a ribosome binding site is operably linked to a coding sequence if it is positioned to facilitate translation. Generally, “operably linked” means that the nucleotide sequences being linked are contiguous, and, in the case of a secretory leader, contiguous and in reading phase. However, enhancers do not have to be contiguous. Linking is accomplished by ligation at convenient restriction sites. If such sites do not exist, the synthetic oligonucleotide adaptors or linkers are used in accordance with conventional practice.

[0152] “Transfection” is the process of deliberately introducing nucleic acid molecules or polynucleotides (including vectors) into target cells. The term is mostly used for non-viral methods in eukaryotic cells. Transduction is often used to describe virus-mediated transfer of nucleic acid molecules or polynucleotides. Transfection of animal cells typically involves opening transient pores or “holes” in the cell membrane, to allow the uptake of material. Transfection can be carried out using biological particles (such as viral transfection, also called viral transduction), chemical-based methods (such as using calcium phosphate, lipofection, Fugene, cationic polymers, nanoparticles) or physical treatment (such as electroporation, microinjection, gene gun, cell squeezing, magnetofection, hydrostatic pressure, impalefection, sonication, optical transfection, heat shock).

[0153] The term “transformation” is used to describe non-viral transfer of nucleic acid molecules or polynucleotides (including vectors) into bacteria, and into non-animal eukaryotic cells, including plant cells. Transformation is hence the genetic alteration of a bacterial or non-animal eukaryotic cell resulting from the direct uptake through the cell membrane(s) from its surroundings and subsequent incorporation of exogenous genetic material (nucleic acid molecules). Transformation can be achieved by artificial means. For transformation to happen, cells or bacteria must be in a state of competence, which might occur as a time-limited response to environmental conditions such as starvation and cell density and can also be artificially induced.

[0154] Moreover, the invention provides a host cell transformed or transfected with the polynucleotide/nucleic acid molecule of the invention or with the vector of the invention.

[0155] As used herein, the terms “host cell” or “recipient cell” are intended to include any individual cell or cell culture that can be or has been recipient of vectors, exogenous nucleic acid molecules and/or polynucleotides encoding the construct of the present invention; and/or recipients of the construct itself. The introduction of the respective material into the cell is carried out by way of transformation, transfection and the like (vide supra). The term “host cell” is also intended to include progeny or potential progeny of a single cell. Because certain modifications may occur in succeeding generations due to either natural, accidental, or deliberate mutation or due to environmental influences, such progeny may not, in fact, be completely identical (in morphology or in genomic or total DNA complement) to the parent cell but is still included within the scope of the term as used herein. Suitable host cells include prokaryotic or eukaryotic cells and include—but are not limited to—bacteria (such as E. coli), yeast cells, fungi cells, plant cells, and animal cells such as insect cells and mammalian cells, e.g., hamster, murine, rat, macaque or human.

[0156] In addition to prokaryotes, eukaryotic microbes such as filamentous fungi or yeast are suitable cloning or expression hosts for the construct of the invention. Saccharomyces cerevisiae, or common baker's yeast, is the most commonly used among lower eukaryotic host microorganisms. However, a number of other genera, species, and strains are commonly available and useful herein, such as Schizosaccharomyces pombe, Kluyveromyces hosts such as K. lactis, K. fragilis (ATCC 12424), K. bulgaricus (ATCC 16045), K. wickeramii (ATCC 24178), K. waltii (ATCC 56500), K. drosophilarum (ATCC 36906), K. thermotolerans, and K. marxianus; yarrowia (EP 402 226); Pichia pastoris (EP 183 070); Candida; Trichoderma reesia (EP 244 234); Neurospora crassa; Schwanniomyces such as Schwanniomyces occidentalis; and filamentous fungi such as Neurospora, Penicillium, Tolypocladium, and Aspergillus hosts such as A. nidulans and A. niger.

[0157] Suitable host cells for the expression of a glycosylated construct are derived from multicellular organisms. Examples of invertebrate cells include plant and insect cells. Numerous baculoviral strains and variants and corresponding permissive insect host cells from hosts such as Spodoptera frugiperda (caterpillar), Aedes aegypti (mosquito), Aedes albopictus (mosquito), Drosophila melanogaster (fruit fly), and Bombyx mori (silkmoth) have been identified. A variety of viral strains for transfection are publicly available, e.g., the L-1 variant of Autographa californica NPV and the Bm-5 strain of Bombyx mori NPV, and such viruses may be used as the virus herein according to the present invention, particularly for transfection of Spodoptera frugiperda cells.

[0158] Plant cell cultures of cotton, corn, potato, soybean, petunia, tomato, Arabidopsis and tobacco can also be used as hosts. Cloning and expression vectors useful in the production of proteins in plant cell culture are known to those of skill in the art. See e.g. Hiatt et al., Nature (1989) 342: 76-78, Owen et al. (1992) Bio/Technology 10: 790-794, Artsaenko et al. (1995) The Plant J 8: 745-750, and Fecker et al. (1996) Plant Mol Biol 32: 979-986.

[0159] However, interest has been greatest in vertebrate cells, and propagation of vertebrate cells in culture (cell culture) has become a routine procedure. Examples of useful mammalian host cell lines are monkey kidney CV1 line transformed by SV40 (such as COS-7, ATCC CRL 1651); human embryonic kidney line (such as 293 or 293 cells subcloned for growth in suspension culture, Graham et al., J. Gen Virol. 36: 59 (1977)); baby hamster kidney cells (such as BHK, ATCC CCL 10); Chinese hamster ovary cells/-DHFR (such as CHO, Urlaub et al., Proc. Natl. Acad. Sci. USA 77: 4216 (1980)); mouse sertoli cells (such as TM4, Mather, Biol. Reprod. 23: 243-251 (1980)); monkey kidney cells (such as CVI ATCC CCL 70); African green monkey kidney cells (such as VERO-76, ATCC CRL1587); human cervical carcinoma cells (such as HELA, ATCC CCL 2); canine kidney cells (such as MDCK, ATCC CCL 34); buffalo rat liver cells (such as BRL 3A, ATCC CRL 1442); human lung cells (such as W138, ATCC CCL 75); human liver cells (such as Hep G2,1413 8065); mouse mammary tumor (such as MMT 060562, ATCC CCL-51); TRI cells (Mather et al., Annals N. Y Acad. Sci. (1982) 383: 44-68); MRC 5 cells; FS4 cells; and a human hepatoma line (such as Hep G2).

[0160] In a further embodiment, the invention provides a process for the production of a polypeptide or polypeptide construct of the invention, said process comprising culturing a host cell of the invention under conditions allowing the expression of the construct of the invention and recovering the produced construct from the culture.

[0161] As used herein, the term “culturing” refers to the in vitro maintenance, differentiation, growth, proliferation and/or propagation of cells under suitable conditions in a medium. Cells are grown and maintained in a cell growth medium at an appropriate temperature and gas mixture. Culture conditions vary widely for each cell type. Typical growth conditions are a temperature of about 37° C., a C02 concentration of about 5% and a humidity of about 95%. Recipes for growth media can vary e.g. in pH, concentration of the carbon source (such as glucose), nature and concentration of growth factors, and the presence of other nutrients (such as amino acids or vitamins). The growth factors used to supplement media are often derived from the serum of animal blood, such as fetal bovine serum (FBS), bovine calf serum (FCS), equine serum, and porcine serum. Cells can be grown either in suspension or as adherent cultures. There are also cell lines that have been modified to be able to survive in suspension cultures, so they can be grown to a higher density than adherent conditions would allow.

[0162] The term “expression” includes any step involved in the production of a construct of the invention including, but not limited to, transcription, post-transcriptional modification, translation, folding, post-translational modification, targeting to specific subcellular or extracellular locations, and secretion. The term “recovering” refers to a series of processes intended to isolate the construct from the cell culture. The “recovering” or “purification” process may separate the protein and non-protein parts of the cell culture, and finally separate the desired construct from all other polypeptides and proteins. Separation steps usually exploit differences in protein size, physico-chemical properties, binding affinity and biological activity. Preparative purifications aim to produce a relatively large quantity of purified proteins for subsequent use, while analytical purification produces a relatively small amount of a protein for a variety of research or analytical purposes.

[0163] When using recombinant techniques, the construct can be produced intracellularly, in the periplasmic space, or directly secreted into the medium. If the construct is produced intracellularly, as a first step, the particulate debris, either host cells or lysed fragments, are removed, for example, by centrifugation or ultrafiltration. The construct of the invention may e.g. be produced in bacteria such as E. coli. After expression, the construct is isolated from the bacterial cell paste in a soluble fraction and can be purified e.g. via affinity chromatography and/or size exclusion. Final purification can be carried out in a manner that is like the process for purifying a construct expressed in mammalian cells and secreted into the medium. Carter et al. (Biotechnology (NY) 1992 February; 10(2):163-7) describe a procedure for isolating antibodies which are secreted to the periplasmic space of E. coli.

[0164] Where the antibody is secreted into the medium, supernatants from such expression systems are generally first concentrated using a commercially available protein concentration filter, for example, an ultrafiltration unit.

[0165] The construct of the invention prepared from the host cells can be recovered or purified using, for example, hydroxylapatite chromatography, gel electrophoresis, dialysis, and affinity chromatography. Other techniques for protein purification such as fractionation on an ion-exchange column, mixed mode ion exchange, HIC, ethanol precipitation, size exclusion chromatography, reverse phase HPLC, chromatography on silica, chromatography on heparin sepharose, chromatography on an anion or cation exchange resin (such as a polyaspartic acid column), immunoaffinity (such as Protein A/G/L) chromatography, chromato-focusing, SDS-PAGE, ultracentrifugation, and ammonium sulfate precipitation are also available depending on the construct to be recovered.

[0166] A protease inhibitor may be included in any of the foregoing steps to inhibit proteolysis, and antibiotics may be included to prevent the growth of contaminants.

[0167] Moreover, the invention provides a pharmaceutical composition or formulation comprising a polypeptide or polypeptide construct of the invention or a polypeptide or polypeptide construct produced according to the process of the invention. As used herein, the term “pharmaceutical composition” relates to a composition which is suitable for administration to a patient, preferably a human patient. The particularly preferred pharmaceutical composition of this invention comprises one or a plurality of the construct(s) of the invention, preferably in a therapeutically effective amount. Preferably, the pharmaceutical composition further comprises suitable formulations of one or more (pharmaceutically effective) carriers, stabilizers, excipients, diluents, solubilizers, surfactants, emulsifiers, preservatives and/or adjuvants. Acceptable constituents of the composition are preferably nontoxic to recipients at the dosages and concentrations employed. Pharmaceutical compositions of the invention include, but are not limited to, liquid, frozen, and lyophilized compositions.

[0168] The compositions may comprise a pharmaceutically acceptable carrier. In general, as used herein, “pharmaceutically acceptable carrier” means all aqueous and non-aqueous solutions, sterile solutions, solvents, buffers, e.g. phosphate buffered saline (PBS) solutions, water, suspensions, emulsions, such as oil/water emulsions, various types of wetting agents, liposomes, dispersion media and coatings, which are compatible with pharmaceutical administration, in particular with parenteral administration. The use of such media and agents in pharmaceutical compositions is well known in the art, and the compositions comprising such carriers can be formulated by well-known conventional methods.

[0169] Certain embodiments provide pharmaceutical compositions comprising the construct of the invention and further one or more excipients such as those illustratively described in this section and elsewhere herein. Excipients can be used in the invention for a wide variety of purposes, such as adjusting physical, chemical, or biological properties of formulations, such as adjustment of viscosity, and or processes of the invention to improve effectiveness and/or to stabilize such formulations and processes against degradation and spoilage e.g. due to stresses that occur during manufacturing, shipping, storage, pre-use preparation, administration, and thereafter. Excipients should in general be used in their lowest effective concentrations.

[0170] In certain embodiments, the pharmaceutical composition may contain formulation materials for modifying, maintaining or preserving certain characteristics of the composition such as the pH, osmolarity, viscosity, clarity, color, isotonicity, odor, sterility, stability, rate of dissolution or release, adsorption or penetration (see, Remington's Pharmaceutical Sciences, 18” Edition, 1990, Mack Publishing Company). In such embodiments, suitable formulation materials may include, but are not limited to:
[0171] amino acids
[0172] antimicrobials such as antibacterial and antifungal agents
[0173] antioxidants
[0174] buffers, buffer systems and buffering agents that are used to maintain the composition at physiological pH or at a slightly lower pH, typically within a range of from about 5 to about 8 or 9
[0175] non-aqueous solvents, vegetable oils, and injectable organic esters
[0176] aqueous carriers including water, alcoholic/aqueous solutions, emulsions or suspensions, including saline and buffered media
[0177] biodegradable polymers such as polyesters
[0178] bulking agents
[0179] chelating agents
[0180] isotonic and absorption delaying agents
[0181] complexing agents
[0182] fillers
[0183] carbohydrates
[0184] (low molecular weight) proteins, polypeptides or proteinaceous carriers, preferably of human origin
[0185] coloring and flavouring agents
[0186] sulfur containing reducing agents
[0187] diluting agents
[0188] emulsifying agents
[0189] hydrophilic polymers
[0190] salt-forming counter-ions
[0191] preservatives
[0192] metal complexes
[0193] solvents and co-solvents
[0194] sugars and sugar alcohols
[0195] suspending agents
[0196] surfactants or wetting agents
[0197] stability enhancing agents
[0198] tonicity enhancing agents
[0199] parenteral delivery vehicles
[0200] intravenous delivery vehicles

[0201] It is common knowledge that the different constituents of the pharmaceutical composition can have different effects, for example, and amino acid can act as a buffer, a stabilizer and/or an antioxidant; mannitol can act as a bulking agent and/or a tonicity enhancing agent; sodium chloride can act as delivery vehicle and/or tonicity enhancing agent; etc.

[0202] In the context of the present invention, a pharmaceutical composition may comprise:
[0203] (a) a polypeptide or polypeptide construct as described herein,
[0204] (b) at least one buffer agent,
[0205] (c) at least one saccharide, and
[0206] (d) at least one surfactant;
[0207] wherein the pH of the pharmaceutical composition is in the range of 3.5 to 6.

[0208] In the composition described above, the first domain preferably has an isoelectric point (pI) in the range of 4 to 9.5; the second domain has a pI in the range of 8 to 10, preferably 8.5 to 9.0; and the construct optionally comprises a third domain comprising two polypeptide monomers, each comprising a hinge, a CH2 domain and a CH3 domain, wherein said two polypeptide monomers are fused to each other via a peptide linker.

[0209] In the composition described above, it is further envisaged that the at least one buffer agent is present at a concentration range of 5 to 200 mM, more preferably at a concentration range of 10 to 50 mM. It is also envisaged that the at least one saccharide is selected from the group consisting of monosaccharide, disaccharide, cyclic polysaccharide, sugar alcohol, linear branched dextran or linear non-branched dextran. It is also envisaged that the disaccharide is selected from the group consisting of sucrose, trehalose and mannitol, sorbitol, and combinations thereof. It is further envisaged that the sugar alcohol is sorbitol. It is also envisaged that the at least one saccharide is present at a concentration in the range of 1 to 15% (m/V), preferably in a concentration range of 9 to 12% (m/V). It is further envisaged that the construct is present in a concentration range of 0.1 to 8 mg/ml, preferably of 0.2-2.5 mg/ml, more preferably of 0.25-1.0 mg/ml.

[0210] According to one embodiment of the composition described above, the at least one surfactant is selected from the group consisting of polysorbate 20, polysorbate 40, polysorbate 60, polysorbate 80, poloxamer 188, pluronic F68, triton X-100, polyoxyethylen, PEG 3350, PEG 4000 and combinations thereof. It is further envisaged that the at least one surfactant is present at a concentration in the range of 0.004 to 0.5% (m/V), preferably in the range of 0.001 to 0.01% (m/V). It is envisaged that the pH of the composition is in the range of 4.0 to 5.0, preferably 4.2. It is also envisaged that the pharmaceutical composition has an osmolarity in the range of 150 to 500 mOsm. It is further envisaged that the pharmaceutical composition further comprises an excipient selected from the group consisting of one or more polyol(s) and one or more amino acid(s). It is envisaged in the context of the present invention that said one or more excipient is present in the concentration range of 0.1 to 15% (w/V).

[0211] The present invention also provides a pharmaceutical composition comprising (a) the construct as described herein, preferably in a concentration range of 0.1 to 8 mg/ml, preferably of 0.2-2.5 mg/ml, more preferably of 0.25-1.0 mg/ml; (b) 10 mM glutamate or acetate; (c) 9% (m/V) sucrose or 6% (m/V) sucrose and 6% (m/V) hydroxypropyl-β-cyclodextrin; (d) 0.01% (m/V) polysorbate 80; wherein the pH of the liquid pharmaceutical composition is 4.2.

[0212] It is envisaged that the composition of the invention might comprise, in addition to the construct of the invention defined herein, further biologically active agents, depending on the intended use of the composition. Such agents might be drugs acting on the gastro-intestinal system, drugs acting as cytostatica, drugs preventing hyperurikemia, drugs inhibiting immunoreactions, drugs modulating the inflammatory response, drugs acting on the circulatory system and/or agents such as cytokines known in the art. It is also envisaged that the polypeptide construct of the present invention is applied in a co-therapy, i.e., in combination with another anti-cancer medicament.

[0213] In this context, it is envisaged that the pharmaceutical composition of the invention (which comprises a construct comprising a CD3 binding domain and at least a further binding domain which binds to a cell surface target antigen, preferably a tumor antigen on the surface of a target cell, as described in more detail herein above) furthermore comprises an agent, preferably an antibody or construct, which binds to a protein of the immune checkpoint pathway (such as PD-1 or CTLA-4) or to a co-stimulatory immune checkpoint receptor (such as 4-1BB). The present invention also refers to a combination of a polypeptide construct according to the invention (which comprises a construct comprising a CD3 binding domain and at least a further binding domain which binds to a cell surface target antigen, preferably a tumor antigen on the surface of a target cell, as described in more detail herein above) and an agent, preferably an antibody or polypeptide construct, which binds to a protein of the immune checkpoint pathway (such as PD-1 or CTLA-4) or to a co-stimulatory immune checkpoint receptor (such as 4-1BB). Due to the nature of the at least two ingredients of the combination, namely their pharmaceutical activity, the combination can also be referred to as a therapeutic combination. In some embodiments, the combination can be in the form of a pharmaceutical composition or of a kit. According to one embodiment, the pharmaceutical composition or the combination comprises a construct of the invention and an antibody or construct which binds to PD-1. Anti-PD-1 binding proteins useful for this purpose are e.g. described in detail in PCT/US2019/013205 incorporated herein by reference.

[0214] In certain embodiments, the optimal pharmaceutical composition is determined depending upon, for example, the intended route of administration, delivery format and desired dosage. See, for example, Remington's Pharmaceutical Sciences, supra. In certain embodiments, such compositions may influence the physical state, stability, rate of in vivo release and rate of in vivo clearance of the construct of the invention. In certain embodiments, the primary vehicle or carrier in a pharmaceutical composition may be either aqueous or non-aqueous in nature. For example, a suitable vehicle or carrier may be water for injection or physiological saline solution, possibly supplemented with other materials common in compositions for parenteral administration. In certain embodiments, the compositions comprising the construct of the invention may be prepared for storage by mixing the selected composition having the desired degree of purity with optional formulation agents (Remington's Pharmaceutical Sciences, supra) in the form of a lyophilized cake or an aqueous solution. Further, in certain embodiments, the construct of the invention may be formulated as a lyophilizate using appropriate excipients.

[0215] When parenteral administration is contemplated, the therapeutic compositions for use in this invention may be provided in the form of a pyrogen-free, parenterally acceptable aqueous solution comprising the desired construct of the invention in a pharmaceutically acceptable vehicle. A particularly suitable vehicle for parenteral injection is sterile distilled water in which the construct of the invention is formulated as a sterile, isotonic solution, properly preserved. In certain embodiments, the preparation can involve the formulation of the desired molecule with an agent that may provide controlled or sustained release of the product which can be delivered via depot injection, or that may promote sustained duration in the circulation. In certain embodiments, implantable drug delivery devices may be used to introduce the desired construct.

[0216] Additional pharmaceutical compositions will be evident to those skilled in the art, including formulations involving the construct of the invention in sustained or controlled delivery formulations. Techniques for formulating a variety of sustained- or controlled-delivery means are known to those skilled in the art. The construct may also be entrapped in microcapsules prepared, for example, by coacervation techniques or by interfacial polymerization, in colloidal drug delivery systems, or in macroemulsions. Such techniques are disclosed in Remington's Pharmaceutical Sciences, supra.

[0217] Pharmaceutical compositions used for in vivo administration are typically provided as sterile preparations. Sterilization can be accomplished by filtration through sterile filtration membranes. When the composition is lyophilized, sterilization using this method may be conducted either prior to or following lyophilization and reconstitution. Compositions for parenteral administration can be stored in lyophilized form or in a solution. Parenteral compositions are generally placed into a container having a sterile access port, for example, an intravenous solution bag or vial having a stopper pierceable by a hypodermic injection needle.

[0218] Another aspect of the invention includes self-buffering formulations comprising the construct of the invention, which can be used as pharmaceutical compositions, as described in international patent application WO 2006/138181. A variety of publications are available on protein stabilization and formulation materials and methods useful in this regard, such as Arawaka T. et al., Pharm Res. 1991 March; 8(3):285-91; Kendrick et al., “Physical stabilization of proteins in aqueous solution” in: Rational Design of Stable Protein Formulations: Theory and Practice, Carpenter and Manning, eds. Pharmaceutical Biotechnology. 13: 61-84 (2002), and Randolph and Jones, Pharm Biotechnol. 2002; 13:159-75, see particularly the parts pertinent to excipients and processes for self-buffering protein formulations, especially as to protein pharmaceutical products and processes for veterinary and/or human medical uses.

[0219] Salts may be used in accordance with certain embodiments of the invention, e.g. to adjust the ionic strength and/or the isotonicity of a composition or formulation and/or to improve the solubility and/or physical stability of a construct or other ingredient of a composition in accordance with the invention. Ions can stabilize the native state of proteins by binding to charged residues on the protein's surface and by shielding charged and polar groups in the protein and reducing the strength of their electrostatic interactions, attractive, and repulsive interactions. Ions also can stabilize the denatured state of a protein by binding to, particularly the denatured peptide linkages (—CONH) of the protein. Furthermore, ionic interaction with charged and polar groups in a protein also can reduce intermolecular electrostatic interactions and, thereby, prevent or reduce protein aggregation and insolubility.

[0220] Ionic species differ significantly in their effects on proteins. Several categorical rankings of ions and their effects on proteins have been developed that can be used in formulating pharmaceutical compositions in accordance with the invention. One example is the Hofmeister series, which ranks ionic and polar non-ionic solutes by their effect on the conformational stability of proteins in solution. Stabilizing solutes are referred to as “kosmotropic”. Destabilizing solutes are referred to as “chaotropic”. Kosmotropes are commonly used at high concentrations to precipitate proteins from solution (“salting-out”). Chaotropes are commonly used to denature and/or to solubilize proteins (“salting-in”). The relative effectiveness of ions to “salt-in” and “salt-out” defines their position in the Hofmeister series.

[0221] Free amino acids can be used in formulations or compositions comprising the construct of the invention in accordance with various embodiments of the invention as bulking agents, stabilizers, and antioxidants, as well as for other standard uses. Certain amino acids can be used for stabilizing proteins in a formulation, others are useful during lyophilization to ensure correct cake structure and properties of the active ingredient. Some amino acids may be useful to inhibit protein aggregation in both liquid and lyophilized formulations, and others are useful as antioxidants.

[0222] Polyols are kosmotropic and are useful as stabilizing agents in both liquid and lyophilized formulations to protect proteins from physical and chemical degradation processes. Polyols are also useful for adjusting the tonicity of formulations and for protecting against freeze-thaw stresses during transport or the preparation of bulks during the manufacturing process. Polyols can also serve as cryoprotectants in the context of the present invention.

[0223] Certain embodiments of the formulation or composition comprising the construct of the invention can comprise surfactants. Proteins may be susceptible to adsorption on surfaces and to denaturation and resulting aggregation at air-liquid, solid-liquid, and liquid-liquid interfaces. These deleterious interactions generally scale inversely with protein concentration and are typically exacerbated by physical agitation, such as that generated during the shipping and handling of a product. Surfactants are routinely used to prevent, minimize, or reduce surface adsorption. Surfactants also are commonly used to control protein conformational stability. The use of surfactants in this regard is protein specific, since one specific surfactant will typically stabilize some proteins and destabilize others.

[0224] Certain embodiments of the formulation or composition comprising the construct of the invention can comprise one or more antioxidants. To some extent deleterious oxidation of proteins can be prevented in pharmaceutical formulations by maintaining proper levels of ambient oxygen and temperature and by avoiding exposure to light. Antioxidant excipients can also be used to prevent oxidative degradation of proteins. It is envisaged that antioxidants for use in therapeutic protein formulations in accordance with the present invention can be water-soluble and maintain their activity throughout the shelf life of the product (the composition comprising the construct). Antioxidants can also damage proteins and should hence—among other things—be selected in a way to eliminate or sufficiently reduce the possibility of antioxidants damaging the construct or other proteins in the formulation.

[0225] Certain embodiments of the formulation or composition comprising the construct of the invention can comprise one or more preservatives. Preservatives are necessary for example when developing multi-dose parenteral formulations that involve more than one extraction from the same container. Their primary function is to inhibit microbial growth and ensure product sterility throughout the shelf-life or term of use of the drug product. Although preservatives have a long history of use with small-molecule parenterals, the development of protein formulations that include preservatives can be challenging. Preservatives very often have a destabilizing effect (aggregation) on proteins, and this has become a major factor in limiting their use in multi-dose protein formulations. To date, most protein drugs have been formulated for single-use only. However, when multi-dose formulations are possible, they have the added advantage of enabling patient convenience, and increased marketability. A good example is that of human growth hormone (hGH) where the development of preserved formulations has led to commercialization of more convenient, multi-use injection pen presentations. Several aspects need to be considered during the formulation and development of preserved dosage forms. The effective preservative concentration in the drug product must be optimized. This requires testing a given preservative in the dosage form with concentration ranges that confer anti-microbial effectiveness without compromising protein stability.

[0226] As might be expected, development of liquid formulations containing preservatives are more challenging than lyophilized formulations. Freeze-dried products can be lyophilized without the preservative and reconstituted with a preservative containing diluent at the time of use. This shortens the time during which a preservative is in contact with the construct, significantly minimizing the associated stability risks. With liquid formulations, preservative effectiveness and stability should be maintained over the entire product shelf-life. An important point to note is that preservative effectiveness should be demonstrated in the final formulation containing the active drug and all excipient components. Once the pharmaceutical composition has been formulated, it may be stored in sterile vials as a solution, suspension, gel, emulsion, solid, crystal, or as a dehydrated or lyophilized powder. Such formulations may be stored either in a ready-to-use form or in a form (e.g., lyophilized) that is reconstituted prior to administration.

[0227] The biological activity of the pharmaceutical composition defined herein can be determined for instance by in vitro cytotoxicity assays, as described in the following examples, in WO 99/54440 or by Schlereth et al. (Cancer Immunol. Immunother. 20 (2005), 1-12). “Efficacy” or “in vivo efficacy” as used herein refers to the response to therapy by the pharmaceutical composition of formulation of the invention, using e.g. standardized NCI response criteria. The success or in vivo efficacy of the therapy using a pharmaceutical composition of the invention refers to the effectiveness of the composition for its intended purpose, i.e. the ability of the composition to cause its desired effect, i.e. depletion of pathologic cells, e.g. tumor cells. The in vivo efficacy may be monitored by established standard methods for the respective disease entities including, but not limited to, white blood cell counts, differentials, fluorescence activated cell sorting, bone marrow aspiration. In addition, various disease specific clinical chemistry parameters and other established standard methods may be used. Furthermore, computer-aided tomography, X-ray, nuclear magnetic resonance tomography, positron-emission tomography scanning, lymph node biopsies/histologies and other established standard methods may be used.

[0228] Another major challenge in the development of drugs such as the pharmaceutical composition of the invention is the predictable modulation of pharmacokinetic properties. To this end, a pharmacokinetic profile of the drug candidate, i.e. a profile of the pharmacokinetic parameters that affect the ability of a specific drug to treat a given condition, can be established. Pharmacokinetic parameters of the drug influencing the ability of a drug for treating a certain disease entity include, but are not limited to: half-life, volume of distribution, hepatic first-pass metabolism and the degree of blood serum binding. The efficacy of a given drug agent can be influenced by each of the parameters mentioned above.

[0229] “Half-life” is the time required for a quantity to reduce to half its initial value. The medical sciences refer to the half-life of substances or drugs in the human body. In a medical context, half-life may refer to the time it takes for a substance/drug to lose one-half of its activity, e.g. pharmacologic, physiologic, or radiological activity. The half-life may also describe the time that it takes for the concentration of a drug or substance (e.g., a construct of the invention) in blood plasma/serum to reach one-half of its steady-state value (“serum half-life”). Typically, the elimination or removal of an administered substance/drug refers to the body's cleansing through biological processes such as metabolism, excretion, also involving the function of kidneys and liver. The “first-pass metabolism” is a phenomenon of drug metabolism whereby the concentration of a drug is reduced before it reaches the circulation. It is the fraction of drug lost during the process of absorption. Accordingly, by “hepatic first-pass metabolism” is meant the propensity of a drug to be metabolized upon first contact with the liver, i.e. during its first pass through the liver. “Volume of distribution” (VD) means the degree to which a drug is distributed in body tissue rather than the blood plasma, a higher VD indicating a greater amount of tissue distribution. The retention of a drug can occur throughout the various compartments of the body, such as intracellular and extracellular spaces, tissues and organs, etc. “Degree of blood serum binding” means the propensity of a drug to interact with and bind to blood serum proteins, such as albumin, leading to a reduction or loss of biological activity of the drug.

[0230] Pharmacokinetic parameters also include bioavailability, lag time (T lag), Tmax, absorption rates, and/or Cmax for a given amount of drug administered. “Bioavailability” refers to the fraction of an administered dose of a drug/substance that reaches the systemic circulation (the blood compartment). When a medication is administered intravenously, its bioavailability is considered to be 100%. However, when a medication is administered via other routes (such as orally), its bioavailability generally decreases. “Lag time” means the time delay between the administration of the drug and its detection and measurability in blood or plasma. Cmax is the maximum plasma concentration that a drug achieves after its administration (and before the administration of a second dose). Tmax is the time at which Cmax is reached. The time to reach a blood or tissue concentration of the drug which is required for its biological effect is influenced by all parameters. Pharmacokinetic parameters of constructs exhibiting cross-species specificity may be determined in preclinical animal testing in non-chimpanzee primates as outlined above and set forth e.g. in Schlereth et al. (supra).

[0231] One embodiment provides the construct of the invention (or the construct produced according to the process of the invention), for the use as a medicament, particularly for the use in the prevention, treatment or amelioration (preferably treatment) of a disease, preferably a tumorous disease, more preferred a neoplasm, cancer or tumor. Another embodiment provides the use of the construct of the invention (or of the construct produced according to the process of the invention) in the manufacture of a medicament for the prevention, treatment or amelioration of a disease, preferably a tumorous disease, more preferred a neoplasm, cancer or tumor. It is also envisaged to provide a method for the prevention, treatment or amelioration of a disease, preferably a tumorous disease, more preferred a neoplasm, cancer or tumor, comprising the step of administering to a subject in need thereof the construct of the present invention (or the construct produced according to the process of the present invention). The terms “subject in need”, “patient” or those “in need of treatment” include those already with the disease, as well as those in which the disease is to be prevented. The terms also include human and other mammalian subjects that receive either prophylactic or therapeutic treatment.

[0232] The polypeptides/polypeptide constructs of the invention and the formulations/pharmaceutical compositions described herein are useful in the treatment, amelioration and/or prevention of the medical condition as described herein in a patient in need thereof. The term “treatment” refers to both therapeutic treatment and prophylactic or preventative measures. Treatment includes the application or administration of the polypeptides/polypeptide constructs/pharmaceutical composition to the body, to an isolated tissue, or to a cell from a patient or a subject in need who has a disease/disorder as described herein, a symptom of such disease/disorder, or a predisposition toward such disease/disorder, with the purpose to cure, heal, alleviate, relieve, alter, remedy, ameliorate, improve, or affect the disease, the symptom of the disease, or the predisposition toward the disease. The term “amelioration” as used herein refers to any improvement of the disease state of a patient, by the administration of a polypeptide construct according to the invention to such patient or subject in need thereof. Such an improvement may be a slowing down or stopping of the progression of the disease of the patient, and/or as a decrease in severity of disease symptoms, an increase in frequency or duration of disease symptom-free periods or a prevention of impairment or disability due to the disease. The term “prevention” as used herein means the avoidance of the occurrence or of the re-occurrence of a disease as specified herein, by the administration of a construct according to the invention to a subject in need thereof.

[0233] The term “disease” refers to any condition that would benefit from treatment with the construct or the pharmaceutical composition described herein. This includes chronic and acute disorders or diseases including those pathological conditions that predispose the mammal to the disease in question. The disease is preferably a tumorous disease, more preferred a neoplasm, cancer or tumor. The disease, neoplasm, cancer or tumor is preferably positive for a tumor antigen, preferably such as those defined herein above, i.e. it is characterized by expression or overexpression of a tumor antigen, preferably such as those defined herein above. An overexpression of a tumor antigen means that there is an increase by at least 10%, in particular at least 25%, at least 50%, at least 100%, at least 250%, at least 500%, at least 750%, at least 1000% or even more. Expression is, preferably, only found in a diseased tissue, while expression in a corresponding healthy tissue is not or significantly not detectable. According to the invention, diseases associated with cells expressing a tumor antigen, preferably such as those defined herein above, include cancer diseases. Furthermore, according to the invention, cancer diseases preferably are those wherein the cancer cells express a tumor antigen. In accordance with the invention, the disease, preferably tumorous disease, more preferred neoplasm, tumor or cancer is preferably characterized by the presence of BCMA-positive, CD123-positive, CD19-positive, CD20-positive, CD22-positive, CD33-positive, CD70-positive, CDH19-positive, CDH3-positive, CLL1-positive, CS1-positive, CLDN6-positive, CLDN18.2-positive, DLL3-positive, EGFRvIII-positive, FLT3-positive, MAGEB2-positive, MART1-positive, MSLN-positive, MUC17-positive, PSMA-positive, or STEAP1-positive cells. In other words, the tumorous disease, more preferred neoplasm, tumor or cancer is preferably associated with the presence of BCMA-positive, CD123-positive, CD19-positive, CD20-positive, CD22-positive, CD33-positive, CD70-positive, CDH19-positive, CDH3-positive, CLL1-positive, CS1-positive, CLDN6-positive, CLDN18.2-positive, DLL3-positive, EGFRvIII-positive, FLT3-positive, MAGEB2-positive, MART1-positive, MSLN-positive, MUC17-positive, PSMA-positive, or STEAP1-positive cells; the tumorous disease, more preferred neoplasm, tumor or cancer can therefore be termed a BCMA-positive, CD123-positive, CD19-positive, CD20-positive, CD22-positive, CD33-positive, CD70-positive, CDH19-positive, CDH3-positive, CLL1-positive, CS1-positive, CLDN6-positive, CLDN18.2-positive, DLL3-positive, EGFRvIII-positive, FLT3-positive, MAGEB2-positive, MART1-positive, MSLN-positive, MUC17-positive, PSMA-positive, or STEAP1-positive neoplasm, tumor or cancer. It is understood herein, that each of said tumor antigen-positive neoplasms, tumors or cancers can be prevented, treated or ameliorated using a polypeptide or polypeptide construct according to the invention that comprises a binding domain against the tumor antigen expressed by the cells with which said neoplasm, tumor or cancer is associated with. A BCMA-positive, CD123-positive, CD19-positive, CD20-positive, CD22-positive, CD33-positive, CD70-positive, CDH19-positive, CDH3-positive, CLL1-positive, CS1-positive, CLDN6-positive, CLDN18.2-positive, DLL3-positive, EGFRvII-positive, FLT3-positive, MAGEB2-positive, MART1-positive, MSLN-positive, MUC17-positive, PSMA-positive, or STEAP1-positive neoplasm, tumor or cancer can be prevented, treated or ameliorated using a polypeptide or polypeptide construct according to the invention that comprises a binding domain against BCMA (for a BCMA-positive neoplasm, tumor or cancer), CD123 (for a CD123-positive neoplasm, tumor or cancer), CD19 (for a CD19-positive neoplasm, tumor or cancer), CD20 (for a CD20-positive neoplasm, tumor or cancer), CD22 (for a CD22-positive neoplasm, tumor or cancer), CD33 (for a CD33-positive neoplasm, tumor or cancer), CD70 (for a CD70-positive neoplasm, tumor or cancer), CDH19 (for a CDH19-positive neoplasm, tumor or cancer), CDH3 (for a CDH3-positive neoplasm, tumor or cancer), CLL1 (for a CLL1-positive neoplasm, tumor or cancer), CS1 (for a CS1-positive neoplasm, tumor or cancer), CLDN6 (for a CLDN6-positive neoplasm, tumor or cancer), CLDN18.2 (for a CLDN18.2-positive neoplasm, tumor or cancer), DLL3 (for a DLL3-positive neoplasm, tumor or cancer), EGFRvIII (for a EGFRvIII-positive neoplasm, tumor or cancer), FLT3 (for a FLT3-positive neoplasm, tumor or cancer), MAGEB2 (for a MAGEB2-positive neoplasm, tumor or cancer), MART1 (for a MART1-positive neoplasm, tumor or cancer), MSLN (for a MSLN-positive neoplasm, tumor or cancer), MUC17 (for a MUC17-positive neoplasm, tumor or cancer), PSMA (for a PSMA-positive neoplasm, tumor or cancer), and STEAP1 (for a STEAP1-positive neoplasm, tumor or cancer), respectively.

[0234] A “neoplasm” is an abnormal growth of tissue, usually but not always forming a mass. When also forming a mass, it is commonly referred to as a “tumor”. Neoplasms or tumors can be benign, potentially malignant (pre-cancerous), or malignant (cancerous). Malignant neoplasms/tumors are commonly called cancer. They usually invade and destroy the surrounding tissue and may form metastases, i.e., they spread to other parts, tissues or organs of the body. A “primary tumor” is a tumor growing at the anatomical site where tumor progression began and proceeded to yield a cancerous mass. Most cancers develop at their primary site but then go on to metastasize or spread to other parts (e.g. tissues and organs) of the body. These further tumors are “secondary tumors”. Most cancers continue to be called after their primary site, even after they have spread to other parts of the body.

[0235] Lymphomas and leukemias are lymphoid neoplasms. For the purposes of the present invention, they are also encompassed by the terms “tumor” and “cancer”. For the purposes of the present invention, the terms “neoplasm”, “tumor” and “cancer” may be used interchangeably, and they comprise both primary tumors/cancers and secondary tumors/cancers (or “metastases”) as well as mass-forming neoplasms (tumors) and lymphoid neoplasms (such as lymphomas and leukemias), and minimal residual disease (MRD).

[0236] The term “minimal residual disease” (MRD) refers to the evidence for the presence of small numbers of residual cancer cells that remain in the patient after cancer treatment, e.g. when the patient is in remission (no symptoms or signs of disease). A very small number of remaining cancer cells usually cannot be detected by routine means because the standard tests used to assess or detect cancer are not sensitive enough to detect MRD. Nowadays, very sensitive molecular biology tests for MRD are available, such as flow cytometry, PCR and next-generation sequencing. These tests can measure minimal levels of cancer cells in tissue samples, sometimes as low as one cancer cell in a million normal cells. In the context of the present invention, the terms “prevention”, “treatment” or “amelioration” of a cancer are envisaged to also encompass “prevention, treatment or amelioration of MRD”, whether the MRD was detected or not.

[0237] The construct of the invention will generally be designed for specific routes and methods of administration, for specific dosages and frequencies of administration, for specific treatments of specific diseases, with ranges of bio-availability and persistence, among other things. The materials of the composition are preferably formulated in concentrations that are acceptable for the site of administration. Formulations and compositions thus may be designed in accordance with the invention for delivery by any suitable route of administration. In the context of the present invention, the routes of administration include, but are not limited to topical routes, enteral routes and parenteral routes.

[0238] If the pharmaceutical composition has been lyophilized, the lyophilized material is first reconstituted in an appropriate liquid prior to administration. The lyophilized material may be reconstituted in, e.g., bacteriostatic water for injection (BWFI), physiological saline, phosphate buffered saline (PBS), or the same formulation the protein had been in prior to lyophilization. The pharmaceutical compositions and the construct of this invention are particularly useful for parenteral administration, e.g., intravenous delivery, for example by injection or infusion. Pharmaceutical compositions may be administered using a medical device. Examples of medical devices for administering pharmaceutical compositions are described in U.S. Pat. Nos. 4,475,196; 4,439,196; 4,447,224; 4,447,233; 4,486,194; 4,487,603; 4,596,556; 4,790,824; 4,941,880; 5,064,413; 5,312,335; 5,312,335; 5,383,851; and 5,399,163.

[0239] The compositions of the present invention can be administered to the subject at a suitable dose which can be determined e.g. in dose escalating studies. As set forth above, the construct of the invention exhibiting cross-species specificity as described herein can also be advantageously used in in preclinical testing in non-chimpanzee primates. The dosage regimen will be determined by the attending physician and clinical factors. As is well known in the medical art, dosages for any one patient depend upon many factors, including the patient's size, body surface area, age, the specific compound to be administered, sex, time and route of administration, general health, and other drugs being administered concurrently.

[0240] An “effective dose” is an amount of a therapeutic agent that is sufficient to achieve or at least partially achieve a desired effect. A “therapeutically effective dose” is an amount that is sufficient to cure or at least partially arrest the disease and its complications, signs and symptoms in a patient suffering from the disease. Amounts or doses effective for this use will depend on the disease to be treated (the indication), the delivered construct, the therapeutic context and objectives, the severity of the disease, prior therapy, the patient's clinical history and response to the therapeutic agent, the route of administration, the size (body weight, body surface) and/or condition (the age and general health) of the patient, and the general state of the patient's own immune system. The proper dose can be adjusted according to the judgment of the attending physician, to obtain the optimal therapeutic effect.

[0241] A therapeutically effective amount of a construct of the invention preferably results in a decrease in severity of disease symptoms, an increase in frequency or duration of disease symptom-free periods or a prevention of impairment or disability due to the disease. In the treatment of tumor antigen-expressing tumors, a therapeutically effective amount of the construct of the invention comprising a binding domain against said tumor antigen preferably inhibits tumor cell growth by at least about 20%, at least about 40%, at least about 50%, at least about 60%, at least about 70%, at least about 80%, or at least about 90% relative to untreated patients. The ability of a compound to inhibit tumor growth may also be evaluated in an animal model predictive of efficacy in human tumors.

[0242] In a further embodiment, the invention provides a kit comprising a construct of the invention, a construct produced according to the process of the invention, a polynucleotide of the invention, a vector of the invention, and/or a host cell of the invention. In the context of the present invention, the term “kit” means two or more components—one of which corresponding to the construct, the pharmaceutical composition, the polynucleotide, the vector or the host cell of the invention—packaged together in a container, recipient or otherwise. A kit can hence be described as a set of products and/or utensils that are sufficient to achieve a certain goal, which can be marketed as a single unit.

[0243] It is envisaged that a further component of the kit of the invention is an agent, preferably an antibody or construct, which binds to a protein of the immune checkpoint pathway (such as PD-1 or CTLA-4) or to a co-stimulatory immune checkpoint receptor (such as 4-1BB). These agents are described in more detail herein above. According to one embodiment, the kit comprises a construct of the invention and an antibody or construct which binds to PD-1. Anti-PD-1 binding proteins useful for this purpose are e.g. described in detail in PCT/US2019/013205. In certain embodiment, the kit allows for the simultaneous and/or sequential administration of the components.

[0244] The kit may comprise one or more recipients (such as vials, ampoules, containers, syringes, bottles, bags) of any appropriate shape, size and material (preferably waterproof, e.g. plastic or glass) containing the construct or the pharmaceutical composition of the present invention in an appropriate dosage for administration (see above). The kit may additionally contain directions for use (e.g. in the form of a leaflet or instruction manual), means for administering the construct or the pharmaceutical composition of the present invention such as a syringe, pump, infuser or the like, means for reconstituting the construct of the invention and/or means for diluting the construct of the invention.

[0245] The invention also provides kits for a single-dose administration unit. The kit of the invention may also contain a first recipient comprising a dried/lyophilized construct or pharmaceutical composition and a second recipient comprising an aqueous formulation. In certain embodiments of this invention, kits containing single-chambered and multi-chambered pre-filled syringes are provided.

[0246] Whenever the term “construct” is used herein, said term refers to the used polypeptide/polypeptide constructs of the invention or controls thereof as indicated.

[0247] As used herein, the singular forms “a”, “an”, and “the” include plural references unless the context clearly indicates otherwise. Thus, for example, reference to “a reagent” includes one or more of such different reagents and reference to “the method” includes reference to equivalent steps and methods known to those of ordinary skill in the art that could be modified or substituted for the methods described herein.

[0248] Unless otherwise indicated, the term “at least” preceding a series of elements is to be understood to refer to every element in the series. Those skilled in the art will recognize or be able to ascertain using no more than routine experimentation, many equivalents to the specific embodiments of the invention described herein. Such equivalents are intended to be encompassed by the present invention.

[0249] The term “and/or” wherever used herein includes the meaning of “and”, “or” and “all or any other combination of the elements connected by said term”.

[0250] The term “about” or “approximately” as used herein means within ±20%, preferably within +15%, more preferably within +10%, and most preferably within ±5% of a given value or range. It also includes the concrete value, e.g., “about 50” includes the value “50”.

[0251] Throughout this specification and the claims, unless the context requires otherwise, the word “comprise”, and variations such as “comprises” and “comprising”, will be understood to imply the inclusion of a stated integer or step or group of integers or steps but not the exclusion of any other integer or step or group of integer or step. When used herein the term “comprising” can be substituted with the term “containing” or “including” or sometimes when used herein with the term “having”.

[0252] When used herein “consisting of” excludes any element, step, or ingredient not specified in the claim element. When used herein, “consisting essentially of” does not exclude materials or steps that do not materially affect the basic and novel characteristics of the claim.

[0253] In each instance herein, any of the terms “comprising”, “consisting essentially of” and “consisting of” may be replaced with either of the other two terms.

[0254] The above description and the below examples provide exemplary arrangements, but the present invention is not limited to the specific methodologies, techniques, protocols, material, reagents, substances, etc., described herein and as such can vary. The terminology used herein serves to describe specific embodiments only. The terminology used herein does not intend to limit the scope of the present invention, which is defined solely by the claims. Aspects of the invention are provided in the independent claims. Some optional features of the invention are provided in the dependent claims.

[0255] All publications and patents cited throughout the text of this specification (including all patents, patent applications, scientific publications, manufacturer's specifications, instructions, etc.), whether supra or infra, are hereby incorporated by reference in their entirety. Nothing herein is to be construed as an admission that the invention is not entitled to antedate such disclosure by virtue of prior invention. To the extent the material incorporated by reference contradicts or is inconsistent with this specification, the specification will supersede any such material.

[0256] A better understanding of the present invention and of its advantages will be obtained from the following examples, offered for illustrative purposes only. The examples are not intended and should not be construed as to limit the scope of the present invention in any way.

### BRIEF DESCRIPTION OF THE DRAWINGS

[0257] FIG. 1: G4S vs. G4R Linker in CD33 BiTE® molecule variants analyzed by SDS-PAGE without Stress Test

[0258] FIG. 2: PSMA BiTE® variants analyzed by SDS-PAGE without stress test

[0259] FIG. 3: Target 2 TDCC assay

[0260] FIG. 4: Target 1 TDCC assay

[0261] FIG. 5: Direct comparison of a PSMA BiTE® molecule vs. optimized variant of a BiTE molecule

[0262] FIG. 6: Schematic depiction of clipping sites detected in BiTE molecule Z5S and introduced stabilizations

### EXAMPLES

### Example 1: Material and Methods

[0263] Generation and Expression of BiTE Molecules

[0264] Individual DNA fragments of the open reading frames were ordered as gene syntheses and subcloned into a mammalian expression vector by standard cloning methods. The expression vector contained an IgG derived signal peptide for secreted expression into the cell culture supernatant. Sequence verified plasmid clones were transfected into CHO cells, cell culture supernatant of a stable cell pool was harvested after 7 days. Cell culture supernatant was stored at −80° C. until protein purification.

[0265] BiTE Purification Chromatography Analysis

[0266] Protein purification was done by Protein A (Cytiva, Mab Select SuRe column) affinity chromatography followed by size exclusion chromatography (HiLoad® 16/600 Superdex® 200 pg GE Healthcare). According to the OD280 nm signal (blue) peaks were pooled and MW was analyzed by SDS-PAGE. Protein monomer peaks were formulated in 10 mM Citrate, 75 mM Lysine, 4% Trehalose and aliquoted for storage at −80° C.

[0267] SDS-PAGE Analysis

[0268] Samples were denatured by 95° C. for 5 min and applied to non-reducing (−DTT) or reducing (+DTT) SDS-PAGE. Gels were subsequently stained/destained instant blue to visualize protein bands.

[0269] In Vitro FACS Binding Analysis

[0270] Purified BiTE® antibody constructs were applied to flow cytometry to determine binding to target antigen transfected CHO cells or a human CD3 positive T cell line (HPB-ALL) or human PBMCs of healthy volunteers. BiTE molecules were stained using a PE-anti human IgG (1:200). Assay was run at 100/10/1/0.1 nM BiTE® molecules for 30 minutes at 4° C. Staining was referenced to cells only stained by the secondary anti-human Fc-specific PE-conjugated polyclonal Ab.

[0271] FACS-Based Cytotoxicity Assay with Unstimulated Human PBMC

[0272] Isolation of Effector Cells

[0273] Human peripheral blood mononuclear cells (PBMC) were prepared by Ficoll density gradient centrifugation from enriched lymphocyte preparations (buffy coats), a side product of blood banks collecting blood for transfusions. Buffy coats were supplied by a local blood bank and PBMC were prepared on the day after blood collection. After Ficoll density centrifugation and extensive washes with Dulbecco's PBS (Gibco), remaining erythrocytes were removed from PBMC via incubation with erythrocyte lysis buffer (155 mM NH4Cl, 10 mM KHCO3, 100 pM EDTA). Remaining lymphocytes mainly encompass B and T lymphocytes, NK cells and monocytes. PBMC were kept in culture at 37° C./5% C02 in RPMI medium (Gibco) with 10% FCS (Gibco).

[0274] Isolation of Pan T Cells

[0275] Human T cells were isolated from PBMC using Miltenyi Biotec human Pan T cell isolation kit (130-096-535) according to the protocol provided with the kit. T cells were then isolated using LS Columns (Milteny Biotec, #130-042-401). T cells were cultured in RPMI complete medium i.e. RPM11640 (Biochrom AG, #FG1215) supplemented with 10% FBS (Bio West, #S1810), 1× non-essential amino acids (Biochrom AG, #K0293), 10 mM Hepes buffer (Biochrom AG, #L1613), 1 mM sodium pyruvate (Biochrom AG, #L0473) and 100 U/mL penicillin/streptomycin (Biochrom AG, #A2213) at 37° C. in an incubator until needed.

[0276] Target Cell Labeling

[0277] For the analysis of cell lysis in flow cytometry assays, the fluorescent membrane dye DiOC18 (DiO) (Thermo Fisher, #V22886) was used to label target transfected CHO cells as target cells and distinguish them from effector cells. Briefly, cells were harvested, washed once with PBS and adjusted to 10e6 cell/mL in PBS containing 2% (v/v) FBS and the membrane dye DiO (5 μL/10e6 cells). After incubation for 3 min at 37° C., cells were washed twice in complete RPMI medium and the cell number adjusted to 1.25×10e5 cells/mL. The vitality of cells was determined using Nucleocounter NC-250 (Chemometec) and Solution18 Dye containing Acridine Orange and DAPI (Chemometec).

[0278] Flow Cytometry Based Analysis

[0279] This assay was designed to quantify the lysis of cyno or human target-transfected CHO cells in the presence of serial dilutions of bispecific antibody constructs. Equal volumes of DiO-labeled target cells and effector cells (i.e., PBMC w/o CD14+ cells) were mixed, resulting in an E:T cell ratio of 10:1. 160 μl of this suspension were transferred to each well of a 96-well plate. 40 μL of serial dilutions of the corresponding target×CD3 bispecific antibody constructs and a negative control bispecific (a CD3-based bispecific antibody construct recognizing an irrelevant target antigen) or RPMI complete medium as an additional negative control were added. The bispecific antibody-mediated cytotoxic reaction proceeded for 48 hours in a 7% CO2 humidified incubator. Then cells were transferred to a new 96-well plate and loss of target cell membrane integrity was monitored by adding propidium iodide (PI) at a final concentration of 1 μg/mL. PI is a membrane impermeable dye that normally is excluded from viable cells, whereas dead cells take it up and become identifiable by fluorescent emission.

[0280] Samples were measured by flow cytometry on an iQue Plus (Intellicyt, now Sartorius) instrument and analyzed by Forecyt software (Intellicyt). Target cells were identified as DiO-positive cells. PI-negative target cells were classified as living target cells. Percentage of cytotoxicity was calculated according to the following formula:

$$Cytotoxicity [ \% ] = \frac{{}^{n} dead target cells}{{}^{n} target cells} \times 100$$

[0281] n=number of events

[0282] Using GraphPad Prism 7.04 software (Graph Pad Software, San Diego), the percentage of cytotoxicity was plotted against the corresponding bispecific antibody construct concentrations. Dose response curves were analyzed with the four parametric logistic regression models for evaluation of sigmoid dose response curves with fixed hill slope and EC50 values were calculated.

[0283] Stress Test of Samples

[0284] Thermal degradation was induced by incubating samples in formulation buffer at 40° C. for 4 weeks. Physiological pH degradation (pH jump) was induced by adjusting samples in formulation to pH 7.2 with phosphate-buffered saline (PBS) followed by incubation at 37° C. for 4 weeks.

[0285] Solution Preparation

[0286] Denaturing buffer (6M guanidine HCl, 200 mM tris, 20 mM methionine, pH 8.3) was prepared by adding 20 mL 1 M (hydroxymethyl) aminomethane hydrochloride (tris), pH 8.3 (Teknova, St. Louis, MO, P/N T1083) to 87.5 mL 8 M guanidine HCl (Pierce, Rockford, IL, P/N 24115) followed by addition of 299 mg L-methionine (J. T. Baker, P/N 2085-05). The pH of the solution was adjusted to pH 8.3 with 1 N hydrochloric acid (HCl) (Ricca, Arlington, TX, P/N R3700100-120A) or 1 N Sodium hydroxide (NaOH) (Merck, Kenilworth, NJ, P/N 1.09137.100). Volume was adjusted to 100 mL with HPLC-grade water. Reduction solution (500 mM DTT) was prepared by dissolving 7.7 mg pre-weighed dithiothreitol (DTT) (Pierce, Rockford, IL, P/N 20291) in 100 μL denaturing buffer. Alkylation solution (500 mM NaIAA) was prepared by dissolving 15-65 mg sodium iodoacetate (NaIAA) (Sigma, St. Louis, MO, P/N 1-9148) in a volume of denaturing buffer sufficient to yield 500 mM NaIAA. Digestion buffer (50 mM tris, 20 mM methionine, pH 7.8) was prepared by dissolving 299 mg L-methionine in 10 mL 1 M tris, pH 7.8 and adding 100 mL HPLC-grade water. The pH of the solution was adjusted to pH 7.8 with 1 N hydrochloric acid (HCl) (Ricca, Arlington, TX, P/N R3700100-120A) or 1 N Sodium hydroxide (NaOH) (Merck, Kenilworth, NJ, P/N 1.09137.100), and the volume was adjusted to 100 mL with HPLC-grade water. Enzyme solutions (1 mg/mL trypsin, 1 mg/mL neutrophil elastase) were prepared by adding 100 μL digestion buffer to 100 μg trypsin (Roche, Basel, Switzerland, P/N 03708969001) or 100 μg neutrophil elastase (Elastin Products Company, Owensville, MO, P/N SE563). Digest quenching solution (8 M guanidine HCl, 250 mM acetate, pH 4.7) was prepared by dissolving 76.4 g guanidine HCl (Sigma, St. Louis, MO, P/N 50933) and 1.0 g sodium acetate (Sigma, P/N 32319) in 95 mL HPLC grade water. 716 μL glacial acetic acid (Sigma, St. Louis, MO, P/N 320099) was then added, and the pH was adjusted to pH 4.7 with either HCl or NaOH. Volume was then adjusted to 100 mL with HPLC grade water.

[0287] MWCO Spin Filter-Aided Sequential Digest

[0288] 200 μL denaturing buffer was added to a 30 kDa molecular weight cut-off spin unit consisting of a membrane unit positioned inside a centrifuge tube for filtrate collection. (Millipore, Billerica, MA, P/N MRCF0R030 or Pall, Port Washington, NY, P/N OD030C34). This unit was spun for 10 min at 14,000×g using an Eppendorf 5430 centrifuge. Filtrate was discarded. 100 μg sample in formulation buffer was added to the filter unit and spun for 10 min at 14,000×g. Filtrate was discarded. For each sample, 3 μL reducing solution was added to 37 μL denaturing buffer, and 40 μL of this solution was added to the filter unit. Samples were denatured and reduced by incubating at 37° C. water bath for 30 min. For each sample 7 μL alkylation solution was added to 33 μL denaturing buffer, and 40 μL of this solution was added to the filter unit. Samples were alkylated by incubating at room temperature in dark for 20 min. For each sample 4 μL denaturing solution was added to 36 μL denaturing buffer, and 40 μL of this solution was added to the filter unit to quench alkylation. Samples were then spun for 15 min at 14,000×g, and the filtrate was discarded. 200 μL digest buffer was added to the sample, the filter unit was spun for 15 min at 14,000×g, and the filtrate was discarded; this was repeated two additional times to remove denaturing, reducing, and alkylating agents. For each sample, 5 μL trypsin solution was added to 35 μL digest buffer, and 40 μL of this solution was added to the filter unit (1:20 enzyme:substrate ratio). Sample was incubated in a 37° C. water bath for 60 min. The filter unit was transferred to a new collection tube (Collection Tube 2). The initial collection tube (Collection Tube 1) was set aside. The filter unit was centrifuged for 10 min at 14,000×g. Filtrate, which contained tryptic peptides, was retained in Collection Tube 2. 20 μL digest buffer was added to the filter unit, the filter unit (in Collection Tube 2) was spun for 10 min at 14,000×g, and the filtrate was retained in Collection Tube 2; this was repeated one additional time. The filter unit was transferred back to Collection Tube 1, and Collection Tube 2 was set aside. For each sample, 5 μL neutrophil elastase solution was added to 35 μL digest buffer, and 40 μL of this solution was added to the filter unit (now in Collection Tube 1, 1:20 enzyme:substrate ratio based on starting material). Sample was incubated in a 37° C. water bath for 30 min. The filter unit was transferred to Collection Tube 2. Collection Tube 1 was discarded. The filter unit was centrifuged for 10 min at 14,000×g. Filtrate, which contained peptides resulting from neutrophil elastase digestion, was retained in Collection Tube 2 (along with tryptic peptides from previous steps). 20 μL digest buffer was added to the filter unit, the filter unit (in Collection Tube 2) was spun for 10 min at 14,000×g, and the filtrate was retained in Collection Tube 2; this was repeated one additional time. Digest was quenched by the addition of 160 μL digest quenching buffer to Collection Tube 2.

[0289] UPLC Conditions

[0290] For all samples, Mobile Phase A consisted of 0.1% formic acid in water, and Mobile Phase B consisted of 0.1% formic acid in acetonitrile. Peptides were separated using a BEH C18 1.7 μm, 2.1×150 mm UPLC column (Waters, Milford, MA, P/N 186003556). UPLC separations were performed using either a Thermo Scientific U-3000 system (Waltham, MA), a Waters Acquity H-Class system (Milford, MA), or and Agilent 1290 system (Santa Clara, CA) utilizing gradients outlined in Table 1. Based on starting material, ˜3-4 μg of sample was loaded on column.

[0291] MS Conditions

[0292] Peptides resulting from digestion were analyzed using a Thermo Scientific Q Exactive (Waltham, MA), a Thermo Scientific Q Exactive Plus (Waltham, MA), or a Thermo Scientific Q Exactive BioPharma (Waltham, MA). Because multiple instruments were used, data collection parameters varied slightly depending on the instrument. Instruments were operated in data-dependent mode (top 4-8) over a scan range of 200-2,000 m/z. The AGC target was set to 1 E6 for MS1 scans and 5E5 for MSMS scans. MS1 scans were collected at a resolution of either 35,000 or 140,000, and MS2 scans were collected at a resolution of 17,500. An isolation window of 2-4 m/z was specified for MSMS scans. Peaks with unassigned charge states and charge states greater than 8 were excluded from MSMS. Dynamic exclusion was set to 10 s. Lock Mass of m/z 391.28430 was enabled.

[0293] Data Analysis

[0294] For peptide identification, MS data were searched with MassAnalyzer (data were collected over several months, so multiple versions of MassAnalyzer were used). Carboxymethylation was specified as a static modification. Depending on the experiment, cleavage was specified as either nonspecific or the C-terminus of amino acids KRVITAL amino acids. For all searches, signal-to-noise ratio was set to 20, mass accuracy of 15 ppm was specified, and confidence was set to 0.95. For sequence coverage maps, minimum peak area was set to 1% of the base peak, relative peak area threshold was set to 17%, minimum confidence was set to 0.95, and maximum peptide mass was set to 15,000. For quantitation, MS data were processed with Skyline. Skyline workbooks were created using peptides identified with MassAnalyzer search results.

TABLE 1
UHPLC Gradient. MS data was only collected at 10-78 min.
For the first 10 min, flow was diverted away from the MS
so that reagents used in sample prep could be washed to
waste. Following MS data acquisition, the column was
washed and equilibrated (78-123 min).
Flow was diverted away from the MS during this period.

| Time | % Mobile | Flow Rate | Column |
|---|---|---|---|
| (min) | Phase B | (mL/min) | Temperature (° C.) |
| 0.0 | 1.0 | 0.25 | 50 |
| 10.0 | 1.0 | 0.25 | 50 |
| 11.0 | 10.0 | 0.25 | 50 |
| 78.0 | 36.0 | 0.25 | 50 |
| 80.0 | 90.0 | 0.25 | 50 |
| 85.0 | 90.0 | 0.25 | 50 |
| 87.0 | 1.0 | 0.25 | 50 |
| 89.0 | 1.0 | 0.25 | 50 |
| 91.5 | 10.0 | 0.25 | 50 |
| 99.5 | 45.0 | 0.25 | 50 |
| 101.0 | 90.0 | 0.25 | 50 |
| 107.0 | 90.0 | 0.25 | 50 |
| 109.0 | 1.0 | 0.25 | 50 |
| 123.0 | 1.0 | 0.25 | 50 |

### Example 2: Results

[0295] SDS-PAGE Analysis

[0296] The purified monomers of the generated BiTE molecules were applied to SDS-PAGE analysis under non-reducing and/or reduced conditions. Except for BiTE molecules (W7V, W8I), all BiTE molecules showed one single band at the expected molecular weight under both conditions. For the BiTE molecules W7V and W8I that comprise G4R linker repeats additional bands of lower molecular weight could be observed, suggesting Low molecular weight (LMW) fragments without thermal stress test.

[0297] Cytotoxic Activity

[0298] All analyzed BiTE molecules showed cytotoxic activity on target antigen transfected CHO cells. Activity was either comparable to the reference standard BiTE molecule (Target 2, FIG. 3) or to standard BiTE molecules comprising a parental, less affine target binder (R5C/P2K, Target 1, FIG. 4).

[0299] Thermal Stress Test

[0300] BiTE molecules were applied to thermal stress at 40° C. for four weeks and subsequently analyzed for % LMW increase compared to an untreated sample control as described.

[0301] Anti-CD3 scFv

[0302] The substitution of the standard Anti-CD3 scFv by the stabilized Anti-CD3 scFv in BiTE molecules (F8I vs. F1D, Table 1) with G4Q linker repeats decreased the LMW by 13.3%. When the standard Anti-CD3 scFv and the standard single chain Fc domain were substituted by the according stabilized domains the LMW decreased by 40.9% in the context of G4Q linkers (M5J vs. Q8I, Table 1).

[0303] Linker

[0304] The BiTE molecules comprising the G4Q linker repeats instead of G4S linker repeats showed reduced LMW percentage by 35.8% for BiTE molecules comprising the standard Anti-CD3 scFv, engineered Anti-CD3 scFv cys-clamp and the standard scFc domain (11D vs. F8I, Table 1).

[0305] Without the engineered Anti-CD3 scFv cys-clamp, BiTE molecules comprising G4Q linker repeats showed 32.3% less LMW than BiTE molecules comprising G4S linkers (Z5S vs. Q6S, Table 1).

[0306] BiTE molecules comprising the standard Anti-CD3 scFv without the engineered Anti-CD3 scFv cys-clamp, but the stabilized scFc domain showed 43.3% reduction in LMW in context of G4Q linker repeats versus G4S linker repeats (J1X vs. X7D, Table 1).

[0307] scFc Domain

[0308] The standard versus stabilized single chain Fc domain for BiTE molecules comprising G4Q linker repeats, the standard CD3 binder and an engineered Anti-CD3 scFv cys-clamp showed 3.2% reduction in LMW (F8I vs. M5J, Table 1).

[0309] In combination with the stabilized CD3 binder and the engineered Anti-CD3 scFv cys-clamp, the modified scFc reduced the LMW percentage by 34.0% (F1D vs. Q8I).

[0310] The G4Q linker repeats in combination with the standard anti-CD3 scFv without the engineered anti-CD3 scFv cys-clamp showed ca. 37.5% less LMW for the stabilized scFc comprising BiTE molecule (Q6S vs. X7D, Table 1). Similarly, the stabilized scFc domain in BiTE molecules comprising the standard G4S linker repeats, the standard Anti-CD3 scFv without an engineered Cys-clamp showed ca. 26.2% less LMW than the standard scFc domain (Z5S vs. J1X, Table 1).

TABLE 1
Difference by stabilized anti-CD3 scFv

| Molecule | Target | CD3 | Linker | scFc | CD3 Cys Clamp | % LMW, 4 w 40° C. | % LMW Reduction |
|---|---|---|---|---|---|---|---|
| F8I | 1 | Standard | G4Q | Standard | Yes | 27.8% | 13.3% |
| F1D | | Stabilized | | | | 24.1% | |
| M5J | 1 | Standard | G4Q | Modified | Yes | 26.9% | 40.9% |
| Q8I | | Stabilized | | | | 15.9% | |

Difference by G₄Q Linker repeats

| Molecule | Target | CD3 | Linker | scFc | CD3 Cys Clamp | % LMW, 4 w 40° C. | % LMW Reduction |
|---|---|---|---|---|---|---|---|
| 11D | 1 | Standard | G4S | Standard | Yes | 43.3% | 35.8% |
| F8I | | | G4Q | | | 27.8% | |
| Z5S | 2 | Standard | G4S | Standard | No | 21.9% | 32.3% |
| Q6S | | | G4Q | | | 14.8% | |
| J1X | 2 | Standard | G4S | Modified | No | 16.3% | 43.3% |
| X7D | | | G4Q | | | 9.2% | |

Difference by modified scFc

| Molecule | Target | CD3 | Linker | scFc | CD3 Cys Clamp? | % LMW, 4 w 40° C. | % LMW Reduction |
|---|---|---|---|---|---|---|---|
| F8I | 1 | Standard | G4Q | Standard | Yes | 27.8% | 3.2% |
| M5J | | | | Modified | | 26.9% | |
| F1D | 1 | Stabilized | G4Q | Standard | Yes | 24.1% | 34.0% |
| Q8I | | | | Modified | | 15.9% | |
| Z5S | 2 | Standard | G4S | Standard | No | 22.1% | 26.2% |
| J1X | | | | Modified | | 16.3% | |
| Q6S | 2 | Standard | G4Q | Standard | No | 14.8% | 37.5% |
| X7D | | | | Modified | | 9.2% | |

Difference by engineered CD3 cys-clamp

| Molecule | Target | CD3 | Linker | scFc | CD3 Cys Clamp | % LMW, 4 w 40° C. | % LMW Reduction |
|---|---|---|---|---|---|---|---|
| 11S | 1 | Standard | G4S | Standard | No | 29.0% | −49.3% |
| 11D | | | | | Yes | 43.3% | |
| M4T | 1 | Stabilized | G4Q | Standard | No | 23.6% | −2.1% |
| F1D | | | | | Yes | 24.1% | |
| S5Z | 1 | Stabilized | G4Q | Modified | No | 15.5% | −2.6% |
| Q8I | | | | | Yes | 15.9% | |

[0311] Anti-CD3 scFv Engineered Cys-Clamp

[0312] The introduction of an engineered cys-clamp in the anti-CD3 scFv led to an increase of LMW by 49.3% in a standard BiTE molecule comprising the standard anti-CD3 scFv, standard G4S linker repeats and the standard scFc domain compared to the non-CD3 cys-clamped BiTE molecule counterpart.

[0313] The BiTE molecule that comprised the stabilized anti-CD3 scFv, G4Q linker repeats and the standard single chain Fc domain only showed a 2.1% increase of LMW for the BiTE variant with the engineered cys-clamp versus the same BiTE molecule without the engineered cys-clamp.

[0314] The BiTE molecule comprising the stabilized anti-CD3 scFv and G4Q linker, but the modified single chain Fc domain showed 2.6% increase in LMW for the BiTE molecule including the CD3 engineered cys-clamp.

[0315] Notably, the LMW percentage was slightly for BiTE molecules with the engineered CD3 cys-clamp. However, the BiTE molecules including stabilized domains showed a lower LMW percentage compared to the reference molecule independently of the anti-CD3 scFv cys-clamp (ca. 15.5% LMW versus 29% without the CD3 scFv cys-clamp or 15.9% versus 43.3% respectively with the CD3 scFv cys-clamp).

[0316] Combinations

[0317] For target 1 binding molecules, the BiTE molecule S5Z showed the lowest LMW percentage compared to its reference molecule 11S (15.5% vs. 29%, FIG. 5). In detail, the reduction of total LMW by 46.6% is explained by a reduction in clipping of the anti-CD3 scFv linker, the target scFv linker and of the scFc domain.

[0318] For target 2 binding BiTE molecules, X7D showed 9.2% LMW in total compared to 22.1% LMW of the reference molecule, thus the stabilizations reduced the LMW by 58.2% by replacing G4S linker repeats with G4Q and the standard scFc domain with the stabilized scFc domain.

TABLE 2

| | | | | | | | | % |
|---|---|---|---|---|---|---|---|---|
| | | | | | | | Δ | Reduction |
| | | | | | | | % | in |
| | | | | | | | LMW | clipping |
| | | | | | | % | compared | compared |
| | | | | | CD3 | LMW | to | to |
| | | CD3 | | scFc | Cys | after | reference | reference |
| Sample | Target | binder | Linker | domain | clamp | 4 w 40° C. | molecule | molecule |
| 11S (Reference) | 1 | Standard | G4S | Standard | No | 29.0% | 0.0% | 0.0% |
| 11D | 1 | Standard | G4S | Standard | Yes | 43.3% | 14.3% | 49.3% |
| F8I | 1 | Standard | G4Q | Standard | Yes | 24.1% | −4.9% | −16.9% |
| M5J | 1 | Standard | G4Q | Stabilized | Yes | 27.8% | −1.2% | −4.1% |
| F1D | 1 | Stabilized | G4Q | Standard | Yes | 23.6% | −5.4% | −18.6% |
| M4T | 1 | Stabilized | G4Q | Standard | No | 26.9% | −2.1% | −7.2% |
| Q8I | 1 | Stabilized | G4Q | Stabilized | Yes | 15.9% | −13.1% | −45.2% |
| S5Z | 1 | Stabilized | G4Q | Stabilized | No | 15.5% | −13.5% | −46.6% |

TABLE 3

| | | | | | | | | % |
|---|---|---|---|---|---|---|---|---|
| | | | | | | | Δ | Reduction |
| | | | | | | | % | in |
| | | | | | | | LMW | clipping |
| | | | | | | % | compared | compared |
| | | | | | CD3 | LMW | to | to |
| | | CD3 | | scFc | Cys | after | reference | reference |
| Sample | Target | binder | Linker | domain | clamp | 4 w 40° C. | molecule | molecule |
| Z5S | 2 | Standard | G4S | Standard | No | 22.1% | 0.0% | 0.0% |
| J1X | 2 | Standard | G4S | Standard | No | 16.3% | −5.8% | −26.2% |
| Q6S | 2 | Standard | G4Q | Standard | No | 14.8% | −7.3% | −33.0% |
| X7D | 2 | Standard | G4Q | Standard | No | 9.2% | −12.9% | −58.2% |

### CONCLUSION

[0319] These observations show that the stabilization of a single domain or linker (e.g. anti-CD3 scFv, linker or scFc) by itself contributes to a reduction of LMW % after thermal stress. Furthermore, the combination of G4Q linkers, stabilized anti-CD3 scFv and stabilized in BiTE molecules showed additive effects on the total % LMW (FIG. 5, Table 2).

[0320] In the BiTE molecules tested comprising the standard anti-CD3 scFv, the standard linker and standard scFc domain, the engineered CD3 cys-clamp as a single modification showed an elevated % LMW level (43.3% vs. 29.0%) in the standard BiTE molecule. However, in the context of stabilized domains, the engineered CD3 cys-clamp showed less elevated LMW % levels compared to its non-cys-clamped counterparts (2.1% or 2.6%). Notably, the total level of % LMW after thermal stress was reduced in stabilized BiTE molecules comprising the CD3 cys-clamp compared to the standard control molecule 11D, as well as to the standard BiTE molecule without the anti-CD3 scFv cys-clamp (11S).

[0321] Other Motifs that Show Clipping after Thermal Stress and Mitigations

[0322] In the anti-target scFvs of BiTE molecules, we have identified a clipping site at the N-terminus of VL domains starting with the amino acid sequence: DI. Here, we introduce single amino acid changes to mitigate this clipping site (e.g., D→E mutation).

[0323] Similarly, in BiTE constructs that comprise a VL-linker-VH order in one of the scFv subunits, a SSS motif that is built by the end of the VH (VSS) and a SG4X linker showed elevated clipping that is addressed by depletion of one Serine in the linker sequence (SG4X→G4X) to generate a SS motif, i.e. (VSSGGGGX).

### Sequences

[0324] Sequence List:

| SEQ | | | |
|---|---|---|---|
| ID NO | Designation | Organism | Sequence |
| 1 | G4 | artificial | GGGG |
| 2 | G4A | artificial | GGGGA |
| 3 | G4C | artificial | GGGGC |
| 4 | G4D | artificial | GGGGD |
| 5 | G4E | artificial | GGGGE |
| 6 | G4F | artificial | GGGGF |
| 7 | G4G | artificial | GGGGG |
| 8 | G4H | artificial | GGGGH |
| 9 | G4I | artificial | GGGGI |
| 10 | G4K | artificial | GGGGK |
| 11 | G4L | artificial | GGGGL |
| 12 | G4M | artificial | GGGGM |
| 13 | G4N | artificial | GGGGN |
| 14 | G4P | artificial | GGGGP |
| 15 | G4Q | artificial | GGGGQ |
| 16 | G4S | artificial | GGGGS |
| 17 | G4T | artificial | GGGGT |
| 18 | G4V | artificial | GGGGV |
| 19 | G4W | artificial | GGGGW |
| 20 | G4Y | artificial | GGGGY |
| 21 | SG4A | artificial | SGGGGA |
| 22 | SG4C | artificial | SGGGGC |
| 23 | SG4D | artificial | SGGGGD |
| 24 | SG4E | artificial | SGGGGE |
| 25 | SG4F | artificial | SGGGGF |
| 26 | SG4G | artificial | SGGGGG |
| 27 | SG4H | artificial | SGGGGH |
| 28 | SG4I | artificial | SGGGGI |
| 29 | SG4K | artificial | SGGGGK |
| 30 | SG4L | artificial | SGGGGL |
| 31 | SG4M | artificial | SGGGGM |
| 32 | SG4N | artificial | SGGGGN |
| 33 | SG4P | artificial | SGGGGP |
| 34 | SG4Q | artificial | SGGGGQ |
| 35 | SG4S | artificial | SGGGGS |
| 36 | SG4T | artificial | SGGGGT |
| 37 | SG4V | artificial | SGGGGV |
| 38 | SG4W | artificial | SGGGGW |
| 39 | SG4Y | artificial | SGGGGY |
| 40 | (G4A)3 | artificial | GGGGAGGGGAGGGGA |
| 41 | (G4C)3 | artificial | GGGGCGGGGCGGGGC |
| 42 | (G4D)3 | artificial | GGGGDGGGGDGGGGD |
| 43 | (G4E)3 | artificial | GGGGEGGGGEGGGGE |
| 44 | (G4F)3 | artificial | GGGGFGGGGFGGGGF |
| 45 | (G4G)3 | artificial | GGGGGGGGGGGGGGG |
| 46 | (G4H)3 | artificial | GGGGHGGGGHGGGGH |
| 47 | (G4I)3 | artificial | GGGGIGGGGIGGGGI |
| 48 | (G4K)3 | artificial | GGGGKGGGGKGGGGK |
| 49 | (G4L)3 | artificial | GGGGLGGGGLGGGGL |
| 50 | (G4M)3 | artificial | GGGGMGGGGMGGGGM |
| 51 | (G4N)3 | artificial | GGGGNGGGGNGGGGN |
| 52 | (G4P)3 | artificial | GGGGPGGGGPGGGGP |
| 53 | (G4Q)3 | artificial | GGGGQGGGGQGGGGQ |
| 54 | (G4S)3 | artificial | GGGGSGGGGSGGGGS |
| 55 | (G4T)3 | artificial | GGGGTGGGGTGGGGT |
| 56 | (G4V)3 | artificial | GGGGVGGGGVGGGGV |
| 57 | (G4W)3 | artificial | GGGGWGGGGWGGGGW |
| 58 | (G4Y)3 | artificial | GGGGYGGGGYGGGGY |
| 59 | (G4A)6 | artificial | GGGGAGGGGAGGGGAGGGGAGGGGAGGGGA |
| 60 | (G4C)6 | artificial | GGGGCGGGGCGGGGGGGGCGGGGCGGGGC |
| 61 | (G4D)6 | artificial | GGGGDGGGGDGGGGDGGGGDGGGGDGGGGD |
| 62 | (G4E)6 | artificial | GGGGEGGGGEGGGGEGGGGEGGGGEGGGGE |
| 63 | (G4F)6 | artificial | GGGGFGGGGFGGGGFGGGGFGGGGFGGGGF |
| 64 | (G4G)6 | artificial | GGGGGGGGGGGGGGGG(GGGGGGGGGGGGG |
| 65 | (G4H)6 | artificial | GGGGHGGGGHGGGGHGGGGHGGGGHGGGGH |
| 66 | (G4I)6 | artificial | GGGGIGGGGIGGGGIGGGGIGGGGIGGGGI |
| 67 | (G4K)6 | artificial | GGGGKGGGGKGGGGKGGGGKGGGGKGGGGK |
| 68 | (G4L)6 | artificial | GGGGLGGGGLGGGGLGGGGLGGGGLGGGGL |
| 69 | (G4M)6 | artificial | GGGGMGGGGMGGGGMGGGGMGGGGMGGGGM |
| 70 | (G4N)6 | artificial | GGGGNGGGGNGGGGNGGGGNGGGGNGGGGN |
| 71 | (G4P)6 | artificial | GGGGPGGGGPGGGGGGPGGGGPGGGGP |
| 72 | (G4Q)6 | artificial | GGGGQGGGGQGGGGGQGGGGQ |
| 73 | (G4S)6 | artificial | GGGGSGGGGSGGGSGGGGSGGGGS |
| 74 | (G4T)6 | artificial | GGGGTGGGGTGGGTGGGGTGGGGT |
| 75 | (G4V)6 | artificial | GGGGVGGGGVGGGGVGGGGVGGGGVGGGGV |
| 76 | (G4W)6 | artificial | GGGGWGGGGWGGGGWGGGGWGGGGWGGGGW |
| 77 | (G4Y)6 | artificial | GGGGYGGGGYGGGGYGGGGYGGGGYGGGGY |
| 78 | Fc_1/2 | artificial | DKTHTCPPCPAPELLGGPSVFLFPPKPKDTLMISRTPEVTCVVVDVSHE |
| | | | DPEVKFNWYVDGVEVHNAKTKPCEEQYGSTYRCVSVLTVLHQDWLNGKE |
| | | | YKCKVSNKALPAPIEKTISKAKGQPREPQVYTLPPSREEMTKNQVSLTC |
| | | | LVKGFYPSDIAVEWESNGQPENNYKTTPPVLDSDGSFFLYSKLTVDKSR |
| | | | WQQGNVFSCSVMHEALHNHYTQKSLSLSPGK |
| 79 | Fc_1_delGK | artificial | DKTHTCPPCPAPELLGGPSVFLFPPKPKDTLMISRTPEVTCVVVDVSHE |
| | | | DPEVKFNWYVDGVEVHNAKTKPCEEQYGSTYRCVSVLTVLHQDWLNGKE |
| | | | YKCKVSNKALPAPIEKTISKAKGQPREPQVYTLPPSREEMTKNQVSLTC |
| | | | LVKGFYPSDIAVEWESNGQPENNYKTTPPVLDSDGSFFLYSKLTVDKSR |
| | | | WQQGNVFSCSVMHEALHNHYTQKSLSLSP |
| 80 | Fc_clipopt_1/2 | artificial | CPPCPAPELLGGPSVFLFPPKPKDTLMISRTPEVTCVVVDVSHEEPEVK |
| | | | FNWYVDGVEVHNAKTKPCEEQYGSTYRCVSVLTVLHQDWLNGKEYKCKV |
| | | | SNKALPAPIEKTISKAKGQPREPQVYTLPPSREEMTKNQVSLTCLVKGF |
| | | | YPSDIAVEWESNGQPENNYKTTPPVLDSDGSFFLYSKLTVDKSRWQQGN |
| | | | VFSCSVMHEALHNHYTQKSLSLSPGK |
| 81 | Fc_clipopt_1_delGK | artificial | CPPCPAPELLGGPSVFLFPPKPKDTLMISRTPEVTCVVVDVSHEEPEVK |
| | | | FNWYVDGVEVHNAKTKPCEEQYGSTYRCVSVLTVLHQDWLNGKEYKCKV |
| | | | SNKALPAPIEKTISKAKGQPREPQVYTLPPSREEMTKNQVSLTCLVKGF |
| | | | YPSDIAVEWESNGQPENNYKTTPPVLDSDGSFFLYSKLTVDKSRWQQGN |
| | | | VFSCSVMHEALHNHYTQKSLSLSP |
| 82 | 4F10.03-HCDR1 | artificial | KYAMN |
| 83 | 4F10.03-HCDR2 | artificial | RIRSKYNNYATYYADAVKD |
| 84 | 4F10.03-HCDR3 | artificial | AGNFGTSYISYWAY |
| 85 | 4F10.03-LCDR1 | artificial | GSSTGAVTSGNYPN |
| 86 | 4F10.03-LCDR2 | artificial | GTKFLAP |
| 87 | 4F10.03-LCDR3 | artificial | VLWYSNRWV |
| 88 | 4F10.03_CC-HCDR1 | artificial | KYAMN |
| 89 | 4F10.03_CC-HCDR2 | artificial | RIRSKYNNYATYYADAVKD |
| 90 | 4F10.03_CC-HCDR3 | artificial | AGNFGTSYISYWAY |
| 91 | 4F10.03_CC-LCDR1 | artificial | GSSTGAVTSGNYPN |
| 92 | 4F10.03_CC-LCDR2 | artificial | GTKFLAP |
| 93 | 4F10.03_CC-LCDR3 | artificial | VLWYSNRWV |
| 94 | 4F10.03_GQ-HCDR1 | artificial | KYAMN |
| 95 | 4F10.03_GQ-HCDR2 | artificial | RIRSKYNNYATYYADAVKD |
| 96 | 4F10.03_GQ-HCDR3 | artificial | AGNFGTSYISYWAY |
| 97 | 4F10.03_GQ-LCDR1 | artificial | GSSTGAVTSGNYPN |
| 98 | 4F10.03_GQ-LCDR2 | artificial | GTKFLAP |
| 99 | 4F10.03_GQ-LCDR3 | artificial | VLWYSNRWV |
| 100 | 4F10.03_GQ_CC-HCDR1 | artificial | KYAMN |
| 101 | 4F10.03_GQ_CC-HCDR2 | artificial | RIRSKYNNYATYYADAVKD |
| 102 | 4F10.03_GQ_CC-HCDR3 | artificial | AGNFGTSYISYWAY |
| 103 | 4F10.03_GQ_CC-LCDR1 | artificial | GSSTGAVTSGNYPN |
| 104 | 4F10.03_GQ_CC-LCDR2 | artificial | GTKFLAP |
| 105 | 4F10.03_GQ_CC-LCDR3 | artificial | VLWYSNRWV |
| 106 | 5C3.01-HCDR1 | artificial | KYAIN |
| 107 | 5C3.01-HCDR2 | artificial | RIRSKYNNYATYYADAVKD |
| 108 | 5C3.01-HCDR3 | artificial | AGNFGSSYISYWAY |
| 109 | 5C3.01-LCDR1 | artificial | GSSTGAVTSGNYPN |
| 110 | 5C3.01-LCDR2 | artificial | GTKFLAP |
| 111 | 5C3.01-LCDR3 | artificial | VLWYSNRWV |
| 112 | 5C3.01_CC-HCDR1 | artificial | KYAIN |
| 113 | 5C3.01_CC-HCDR2 | artificial | RIRSKYNNYATYYADAVKD |
| 114 | 5C3.01_CC-HCDR3 | artificial | AGNFGSSYISYWAY |
| 115 | 5C3.01_CC-LCDR1 | artificial | GSSTGAVTSGNYPN |
| 116 | 5C3.01_CC-LCDR2 | artificial | GTKFLAP |
| 117 | 5C3.01_CC-LCDR3 | artificial | VLWYSNRWV |
| 118 | 5C3.01_GQ-HCDR1 | artificial | KYAIN |
| 119 | 5C3.01_GQ-HCDR2 | artificial | RIRSKYNNYATYYADAVKD |
| 120 | 5C3.01_GQ-HCDR3 | artificial | AGNFGSSYISYWAY |
| 121 | 5C3.01_GQ-LCDR1 | artificial | GSSTGAVTSGNYPN |
| 122 | 5C3.01_GQ-LCDR2 | artificial | GTKFLAP |
| 123 | 5C3.01_GQ-LCDR3 | artificial | VLWYSNRWV |
| 124 | 5C3.01_GQ_CC-HCDR1 | artificial | KYAIN |
| 125 | 5C3.01_GQ_CC-HCDR2 | artificial | RIRSKYNNYATYYADAVKD |
| 126 | 5C3.01_GQ_CC-HCDR3 | artificial | AGNFGSSYISYWAY |
| 127 | 5C3.01_GQ_CC-LCDR1 | artificial | GSSTGAVTSGNYPN |
| 128 | 5C3.01_GQ_CC-LCDR2 | artificial | GTKFLAP |
| 129 | 503.01_GQ_CC-LCDR3 | artificial | VLWYSNRWV |
| 130 | 5G6.05-HCDR1 | artificial | KYAMN |
| 131 | 5G6.05-HCDR2 | artificial | RIRSKYNNYATYYAEAVKG |
| 132 | 5G6.05-HCDR3 | artificial | NENIGTSYISYWAY |
| 133 | 5G6.05-LCDR1 | artificial | GSSTGAVTSGNYPN |
| 134 | 5G6.05-LCDR2 | artificial | GTKFLAP |
| 135 | 5G6.05-LCDR3 | artificial | VLWYSNRWV |
| 136 | 5G6.05_CC-HCDR1 | artificial | KYAMN |
| 137 | 5G6.05_CC-HCDR2 | artificial | RIRSKYNNYATYYAEAVKG |
| 138 | 5G6.05_CC-HCDR3 | artificial | NENIGTSYISYWAY |
| 139 | 5G6.05_CC-LCDR1 | artificial | GSSTGAVTSGNYPN |
| 140 | 5G6.05_CC-LCDR2 | artificial | GTKFLAP |
| 141 | 5G6.05_CC-LCDR3 | artificial | VLWYSNRWV |
| 142 | 5G6.05_GQ-HCDR1 | artificial | KYAMN |
| 143 | 5G6.05_GQ-HCDR2 | artificial | RIRSKYNNYATYYAEAVKG |
| 144 | 5G6.05_GQ-HCDR3 | artificial | NENIGTSYISYWAY |
| 145 | 5G6.05_GQ-LCDR1 | artificial | GSSTGAVTSGNYPN |
| 146 | 5G6.05_GQ-LCDR2 | artificial | GTKFLAP |
| 147 | 5G6.05_GQ-LCDR3 | artificial | VLWYSNRWV |
| 148 | 5G6.05_GQ_CC-HCDR1 | artificial | KYAMN |
| 149 | 5G6.05_GQ_CC-HCDR2 | artificial | RIRSKYNNYATYYAEAVKG |
| 150 | 5G6.05_GQ_CC-HCDR3 | artificial | NENIGTSYISYWAY |
| 151 | 5G6.05_GQ_CC-LCDR1 | artificial | GSSTGAVTSGNYPN |
| 152 | 5G6.05_GQ_CC-LCDR2 | artificial | GTKFLAP |
| 153 | 5G6.05_GQ_CC-LCDR3 | artificial | VLWYSNRWV |
| 154 | 6A8.02-HCDR1 | artificial | KYAIN |
| 155 | 6A8.02-HCDR2 | artificial | RIRSKYNNYATYYADAVKD |
| 156 | 6A8.02-HCDR3 | artificial | NANFGTSYISYFAY |
| 157 | 6A8.02-LCDR1 | artificial | GSSTGAVTSGNYPN |
| 158 | 6A8.02-LCDR2 | artificial | GTKFLAP |
| 159 | 6A8.02-LCDR3 | artificial | VLWYSNRWV |
| 160 | 6A8.02_CC-HCDR1 | artificial | KYAIN |
| 161 | 6A8.02_CC-HCDR2 | artificial | RIRSKYNNYATYYADAVKD |
| 162 | 6A8.02_CC-HCDR3 | artificial | NANFGTSYISYFAY |
| 163 | 6A8.02_CC-LCDR1 | artificial | GSSTGAVTSGNYPN |
| 164 | 6A8.02_CC-LCDR2 | artificial | GTKFLAP |
| 165 | 6A8.02_CC-LCDR3 | artificial | VLWYSNRWV |
| 166 | 6A8.02_GQ-HCDR1 | artificial | KYAIN |
| 167 | 6A8.02_GQ-HCDR2 | artificial | RIRSKYNNYATYYADAVKD |
| 168 | 6A8.02_GQ-HCDR3 | artificial | NANFGTSYISYFAY |
| 169 | 6A8.02_GQ-LCDR1 | artificial | GSSTGAVTSGNYPN |
| 170 | 6A8.02_GQ-LCDR2 | artificial | GTKFLAP |
| 171 | 6A8.02_GQ-LCDR3 | artificial | VLWYSNRWV |
| 172 | 6A8.02_GQ_CC-HCDR1 | artificial | KYAIN |
| 173 | 6A8.02_GQ_CC-HCDR2 | artificial | RIRSKYNNYATYYADAVKD |
| 174 | 6A8.02_GQ_CC-HCDR3 | artificial | NANFGTSYISYFAY |
| 175 | 6A8.02_GQ_CC-LCDR1 | artificial | GSSTGAVTSGNYPN |
| 176 | 6A8.02_GQ_CC-LCDR2 | artificial | GTKFLAP |
| 177 | 6A8.02_GQ_CC-LCDR3 | artificial | VLWYSNRWV |
| 178 | 6H10.09-HCDR1 | artificial | KYAMN |
| 179 | 6H10.09-HCDR2 | artificial | RIRSKYNNYATYYADAVKD |
| 180 | 6H10.09-HCDR3 | artificial | AGNFGSSYISYFAY |
| 181 | 6H10.09-LCDR1 | artificial | GSSTGAVTSGNYPN |
| 182 | 6H10.09-LCDR2 | artificial | GTKFLAP |
| 183 | 6H10.09-LCDR3 | artificial | VLYYSNRWV |
| 184 | 6H10.09_CC-HCDR1 | artificial | KYAMN |
| 185 | 6H10.09_CC-HCDR2 | artificial | RIRSKYNNYATYYADAVKD |
| 186 | 6H10.09_CC-HCDR3 | artificial | AGNFGSSYISYFAY |
| 187 | 6H10.09_CC-LCDR1 | artificial | GSSTGAVTSGNYPN |
| 188 | 6H10.09_CC-LCDR2 | artificial | GTKFLAP |
| 189 | 6H10.09_CC-LCDR3 | artificial | VLYYSNRWV |
| 190 | 6H10.09_GQ-HCDR1 | artificial | KYAMN |
| 191 | 6H10.09_GQ-HCDR2 | artificial | RIRSKYNNYATYYADAVKD |
| 192 | 6H10.09_GQ-HCDR3 | artificial | AGNFGSSYISYFAY |
| 193 | 6H10.09_GQ-LCDR1 | artificial | GSSTGAVTSGNYPN |
| 194 | 6H10.09_GQ-LCDR2 | artificial | GTKFLAP |
| 195 | 6H10.09_GQ-LCDR3 | artificial | VLYYSNRWV |
| 196 | 6H10.09_GQ_CC-HCDR1 | artificial | KYAMN |
| 197 | 6H10.09_GQ_CC-HCDR2 | artificial | RIRSKYNNYATYYADAVKD |
| 198 | 6H10.09_GQ_CC-HCDR3 | artificial | AGNFGSSYISYFAY |
| 199 | 6H10.09_GQ_CC-LCDR1 | artificial | GSSTGAVTSGNYPN |
| 200 | 6H10.09_GQ_CC-LCDR2 | artificial | GTKFLAP |
| 201 | 6H10.09_GQ_CC-LCDR3 | artificial | VLYYSNRWV |
| 202 | I2C-HCDR1 | artificial | KYAMN |
| 203 | I2C-HCDR2 | artificial | RIRSKYNNYATYYADSVKD |
| 204 | I2C-HCDR3 | artificial | HGNFGNSYISYWAY |
| 205 | I2C-LCDR1 | artificial | GSSTGAVTSGNYPN |
| 206 | I2C-LCDR2 | artificial | GTKFLAP |
| 207 | I2C-LCDR3 | artificial | VLWYSNRWV |
| 208 | I2C_CC-HCDR1 | artificial | KYAMN |
| 209 | I2C_CC-HCDR2 | artificial | RIRSKYNNYATYYADSVKD |
| 210 | I2C_CC-HCDR3 | artificial | HGNFGNSYISYWAY |
| 211 | I2C_CC-LCDR1 | artificial | GSSTGAVTSGNYPN |
| 212 | I2C_CC-LCDR2 | artificial | GTKFLAP |
| 213 | I2C_CC-LCDR3 | artificial | VLWYSNRWV |
| 214 | I2C_GQ-HCDR1 | artificial | KYAMN |
| 215 | I2C_GQ-HCDR2 | artificial | RIRSKYNNYATYYADSVKD |
| 216 | I2C_GQ-HCDR3 | artificial | HGNFGNSYISYWAY |
| 217 | I2C_GQ-LCDR1 | artificial | GSSTGAVTSGNYPN |
| 218 | I2C_GQ-LCDR2 | artificial | GTKFLAP |
| 219 | I2C_GQ-LCDR3 | artificial | VLWYSNRWV |
| 220 | I2C_GQ_CC-HCDR1 | artificial | KYAMN |
| 221 | I2C_GQ_CC-HCDR2 | artificial | RIRSKYNNYATYYADSVKD |
| 222 | I2C_GQ_CC-HCDR3 | artificial | HGNFGNSYISYWAY |
| 223 | I2C_GQ_CC-LCDR1 | artificial | GSSTGAVTSGNYPN |
| 224 | I2C_GQ_CC-LCDR2 | artificial | GTKFLAP |
| 225 | I2C_GQ_CC-LCDR3 | artificial | VLWYSNRWV |
| 226 | BC_A7_27-C4-G7- | artificial | NHIIH |
| | HCDR1 | | |
| 227 | BC_A7_27-C4-G7- | artificial | YINPYPGYHAYNEKFQG |
| | HCDR2 | | |
| 228 | BC_A7_27-C4-G7- | artificial | DGYYRDTDVLDY |
| | HCDR3 | | |
| 229 | BC_A7_27-C4-G7- | artificial | QASQDISNYLN |
| | LCDR1 | | |
| 230 | BC_A7_27-C4-G7- | artificial | YTSRLHT |
| | LCDR2 | | |
| 231 | BC_A7_27-C4-G7- | artificial | QQGNTLPWT |
| | LCDR3 | | |
| 232 | BC_A7_27-C4-G7_CC- | artificial | NHIIH |
| | HCDR1 | | |
| 233 | BC_A7_27-C4-G7_CC | artificial | YINPYPGYHAYNEKFQG |
| | HCDR2 | | |
| 234 | BC_A7_27-C4-G7_CC- | artificial | DGYYRDTDVLDY |
| | HCDR3 | | |
| 235 | BC_A7_27-C4-G7_CC- | artificial | QASQDISNYLN |
| | LCDR1 | | |
| 236 | BC_A7_27-C4-G7_CC- | artificial | YTSRLHT |
| | LCDR2 | | |
| 237 | BC_A7_27-C4-G7_CC- | artificial | QQGNTLPWT |
| | LCDR3 | | |
| 238 | BC_A7_27-C4- | artificial | NHIIH |
| | G7_CC_clipopt- | | |
| | HCDR1 | | |
| 239 | BC_A7_27-C4- | artificial | YINPYPGYHAYNEKFQG |
| | G7_CC_clipopt- | | |
| | HCDR2 | | |
| 240 | BC_A7_27-C4- | artificial | DGYYRDTDVLDY |
| | G7_CC_clipopt- | | |
| | HCDR3 | | |
| 241 | BC_A7_27-C4- | artificial | QASQDISNYLN |
| | G7_CC_clipopt- | | |
| | LCDR1 | | |
| 242 | BC_A7_27-C4- | artificial | YTSRLHT |
| | G7_CC_clipopt- | | |
| | LCDR2 | | |
| 243 | BC_A7_27-C4- | artificial | QQGNTLPWT |
| | G7_CC_clipopt- | | |
| | LCDR3 | | |
| 244 | BC_A7_27-C4- | artificial | NHIIH |
| | G7_clipopt-HCDR1 | | |
| 245 | BC_A7_27-C4- | artificial | YINPYPGYHAYNEKFQG |
| | G7_clipopt-HCDR2 | | |
| 246 | BC_A7_27-C4- | artificial | DGYYRDTDVLDY |
| | G7_clipopt-HCDR3 | | |
| 247 | BC_A7_27-C4- | artificial | QASQDISNYLN |
| | G7_clipopt-LCDR1 | | |
| 248 | BC_A7_27-C4- | artificial | YTSRLHT |
| | G7_clipopt-LCDR2 | | |
| 249 | BC_A7_27-C4- | artificial | QQGNTLPWT |
| | G7_clipopt-LCDR3 | | |
| 250 | CD123_24-B4-f_NK_ | artificial | HYAMS |
| | CC-HCDR1 | | |
| 251 | CD123_24-B4-f_NK_ | artificial | AVSGGGDKTLYADAVKG |
| | CC-HCDR2 | | |
| 252 | CD123_24-B4-f_NK_ | artificial | LRGFYYGMDV |
| | CC-HCDR3 | | |
| 253 | CD123_24-B4-f_NK_ | artificial | RSSQSLLHSNKYNYLD |
| | CC-LCDR1 | | |
| 254 | CD123_24-B4-f_NK_ | artificial | LGSNRAS |
| | CC-LCDR2 | | |
| 255 | CD123_24-B4-f_NK_ | artificial | MQALQTPPIT |
| | CC-LCDR3 | | |
| 256 | CD123_24-B4- | artificial | HYAMS |
| | f_NK_CC_clipopt- | | |
| | HCDR1 | | |
| 257 | CD123_24-B4- | artificial | AVSGGGDKTLYADAVKG |
| | f_NK_CC_clipopt- | | |
| | HCDR2 | | |
| 258 | CD123_24-B4- | artificial | LRGFYYGMDV |
| | f_NK_CC_clipopt- | | |
| | HCDR3 | | |
| 259 | CD123_24-B4- | artificial | RSSQSLLHSNKYNYLD |
| | f_NK_CC_clipopt- | | |
| | LCDR1 | | |
| 260 | CD123_24-B4- | artificial | LGSNRAS |
| | f_NK_CC_clipopt- | | |
| | LCDR2 | | |
| 261 | CD123_24-B4- | artificial | MQALQTPPIT |
| | f_NK_CC_clipopt- | | |
| | LCDR3 | | |
| 262 | CD19_97-G1RE- | artificial | SYGMH |
| | C2_LH_CC-HCDR1 | | |
| 263 | CD19_97-G1RE- | artificial | VISYEGSNKYYAESVKG |
| | C2_LH_CC-HCDR2 | | |
| 264 | CD19_97-G1RE- | artificial | DRGTIFGNYGLEV |
| | C2_LH_CC-HCDR3 | | |
| 265 | CD19_97-G1RE- | artificial | RSSQSLLHKNAFNYLD |
| | C2_LH_CC-LCDR1 | | |
| 266 | CD19_97-G1RE- | artificial | LGSNRAS |
| | C2_LH_CC-LCDR2 | | |
| 267 | CD19_97-G1RE- | artificial | MQALQTPFT |
| | C2_LH_CC-LCDR3 | | |
| 268 | CD19_97-G1RE- | artificial | SYGMH |
| | C2_LH_CC_clipopt- | | |
| | HCDR1 | | |
| 269 | CD19_97-G1RE- | artificial | VISYEGSNKYYAESVKG |
| | C2_LH_CC_clipopt- | | |
| | HCDR2 | | |
| 270 | CD19_97-G1RE- | artificial | DRGTIFGNYGLEV |
| | C2_LH_CC_clipopt- | | |
| | HCDR3 | | |
| 271 | CD19_97-G1RE- | artificial | RSSQSLLHKNAFNYLD |
| | C2_LH_CC_clipopt- | | |
| | LCDR1 | | |
| 272 | CD19_97-G1RE- | artificial | LGSNRAS |
| | C2_LH_CC_clipopt- | | |
| | LCDR2 | | |
| 273 | CD19_97-G1RE- | artificial | MQALQTPFT |
| | C2_LH_CC_clipopt- | | |
| | LCDR3 | | |
| 274 | CD33_E11-HCDR1 | artificial | NYGMN |
| 275 | CD33_E11-HCDR2 | artificial | WINTYTGEPTYADKFQG |
| 276 | CD33_E11-HCDR3 | artificial | WSWSDGYYVYFDY |
| 277 | CD33_E11-LCDR1 | artificial | KSSQSVLDSSTNKNSLA |
| 278 | CD33_E11-LCDR2 | artificial | WASTRES |
| 279 | CD33_E11-LCDR3 | artificial | QQSAHFPIT |
| 280 | CD33_E11_CC-HCDR1 | artificial | NYGMN |
| 281 | CD33_E11_CC-HCDR2 | artificial | WINTYTGEPTYADKFQG |
| 282 | CD33_E11_CC-HCDR3 | artificial | WSWSDGYYVYFDY |
| 283 | CD33_E11_CC-LCDR1 | artificial | KSSQSVLDSSTNKNSLA |
| 284 | CD33_E11_CC-LCDR2 | artificial | WASTRES |
| 285 | CD33_E11_CC-LCDR3 | artificial | QQSAHFPIT |
| 286 | CD33_E11_CC_GQ- | artificial | NYGMN |
| | HCDR1 | | |
| 287 | CD33_E11_CC_GQ- | artificial | WINTYTGEPTYADKFQG |
| | HCDR2 | | |
| 288 | CD33_E11_CC_GQ- | artificial | WSWSDGYYVYFDY |
| | HCDR3 | | |
| 289 | CD33_E11_CC_GQ- | artificial | KSSQSVLDSSTNKNSLA |
| | LCDR1 | | |
| 290 | CD33_E11_CC_GQ- | artificial | WASTRES |
| | LCDR2 | | |
| 291 | CD33_E11_CC_GQ- | artificial | QQSAHFPIT |
| | LCDR3 | | |
| 292 | CD33_E11_CC_GR- | artificial | NYGMN |
| | HCDR1 | | |
| 293 | CD33_E11_CC_GR- | artificial | WINTYTGEPTYADKFQG |
| | HCDR2 | | |
| 294 | CD33_E11_CC_GR- | artificial | WSWSDGYYVYFDY |
| | HCDR3 | | |
| 295 | CD33_E11_CC_GR- | artificial | KSSQSVLDSSTNKNSLA |
| | LCDR1 | | |
| 296 | CD33_E11_CC_GR- | artificial | WASTRES |
| | LCDR2 | | |
| 297 | CD33_E11_CC_GR- | artificial | QQSAHFPIT |
| | LCDR3 | | |
| 298 | CD33_E11_CC_clipopt- | artificial | NYGMN |
| | HCDR1 | | |
| 299 | CD33_E11_CC_clipopt- | artificial | WINTYTGEPTYADKFQG |
| | HCDR2 | | |
| 300 | CD33_E11_CC_clipopt- | artificial | WSWSDGYYVYFDY |
| | HCDR3 | | |
| 301 | CD33_E11_CC_clipopt- | artificial | KSSQSVLDSSTNKNSLA |
| | LCDR1 | | |
| 302 | CD33_E11_CC_clipopt- | artificial | WASTRES |
| | LCDR2 | | |
| 303 | CD33_E11_CC_clipopt- | artificial | QQSAHFPIT |
| | LCDR3 | | |
| 304 | CD33_E11 clipopt- | artificial | NYGMN |
| | HCDR1 | | |
| 305 | CD33_E11 clipopt- | artificial | WINTYTGEPTYADKFQG |
| | HCDR2 | | |
| 306 | CD33_E11 clipopt | artificial | WSWSDGYYVYFDY |
| | HCDR3 | | |
| 307 | CD33_E11 clipopt- | artificial | KSSQSVLDSSTNKNSLA |
| | LCDR1 | | |
| 308 | CD33_E11 clipopt- | artificial | WASTRES |
| | LCDR2 | | |
| 309 | CD33_E11 clipopt | artificial | QQSAHFPIT |
| | LCDR3 | | |
| 310 | CD70_1_C7D_CC- | artificial | TYAMS |
| | HCDR1 | | |
| 311 | CD70_1_C7D_CC- | artificial | AISGSGGRTFYAESVEG |
| | HCDR2 | | |
| 312 | CD70_1_C7D_CC- | artificial | HDYSNYPYFDY |
| | HCDR3 | | |
| 313 | CD70_1_C7D_CC- | artificial | RASQSVRSTYLA |
| | LCDR1 | | |
| 314 | CD70_1_C7D_CC- | artificial | GASSRAT |
| | LCDR2 | | |
| 315 | CD70_1_C7D_CC- | artificial | QQYGDLPFT |
| | LCDR3 | | |
| 316 | CD70_1_C7D_CC_ | artificial | TYAMS |
| | clipopt-HCDR1 | | |
| 317 | CD70_1_C7D_CC_ | artificial | AISGSGGRTFYAESVEG |
| | clipopt-HCDR2 | | |
| 318 | CD70_1_C7D_CC_ | artificial | HDYSNYPYFDY |
| | clipopt-HCDR3 | | |
| 319 | CD70_1_C7D_CC_ | artificial | RASQSVRSTYLA |
| | clipopt-LCDR1 | | |
| 320 | CD70_1_C7D_CC_ | artificial | GASSRAT |
| | clipopt-LCDR2 | | |
| 321 | CD70_1_C7D_CC_ | artificial | QQYGDLPFT |
| | clipopt-LCDR3 | | |
| 322 | CH19_2G6.007_CC- | artificial | SYGMH |
| | HCDR1 | | |
| 323 | CH19_2G6.007_CC- | artificial | FIWYEGSNKYYAESVKD |
| | HCDR2 | | |
| 324 | CH19_2G6.007_CC- | artificial | RAGIIGTIGYYYGMDV |
| | HCDR3 | | |
| 325 | CH19_2G6.007_CC- | artificial | SGDRLGEKYTS |
| | LCDR1 | | |
| 326 | CH19_2G6.007_CC- | artificial | QDTKRPS |
| | LCDR2 | | |
| 327 | CH19_2G6.007_CC- | artificial | QAWESSTVV |
| | LCDR3 | | |
| 328 | CH19_2G6.007_CC_ | artificial | SYGMH |
| | clipopt-HCDR1 | | |
| 329 | CH19_2G6.007_CC_ | artificial | FIWYEGSNKYYAESVKD |
| | clipopt-HCDR2 | | |
| 330 | CH19_2G6.007_CC_ | artificial | RAGIIGTIGYYYGMDV |
| | clipopt-HCDR3 | | |
| 331 | CH19_2G6.007_CC_ | artificial | SGDRLGEKYTS |
| | clipopt-LCDR1 | | |
| 332 | CH19_2G6.007_CC_ | artificial | QDTKRPS |
| | clipopt-LCDR2 | | |
| 333 | CH19_2G6.007_CC_ | artificial | QAWESSTVV |
| | clipopt-LCDR3 | | |
| 334 | CH3_15-E11_CC- | artificial | NYWMN |
| | HCDR1 | | |
| 335 | CH3_15-E11_CC- | artificial | NIAYGVKGTNYNQKFQG |
| | HCDR2 | | |
| 336 | CH3_15-E11_CC- | artificial | RYFYVMDY |
| | HCDR3 | | |
| 337 | CH3_15-E11_CC- | artificial | RASQDISNYLN |
| | LCDR1 | | |
| 338 | CH3_15-E11_CC- | artificial | YTSRLHS |
| | LCDR2 | | |
| 339 | CH3_15-E11_CC- | artificial | VQYAQFPLT |
| | LCDR3 | | |
| 340 | CH3_15- | artificial | NYWMN |
| | E11_CC_clipopt- | | |
| | HCDR1 | | |
| 341 | CH3_15- | artificial | NIAYGVKGTNYNQKFQG |
| | E11_CC_clipopt- | | |
| | HCDR2 | | |
| 342 | CH3_15- | artificial | RYFYVMDY |
| | E11_CC_clipopt- | | |
| | HCDR3 | | |
| 343 | CH3_15- | artificial | RASQDISNYLN |
| | E11_CC_clipopt- | | |
| | LCDR1 | | |
| 344 | CH3_15- | artificial | YTSRLHS |
| | E11_CC_clipopt- | | |
| | LCDR2 | | |
| 345 | CH3_15- | artificial | VQYAQFPLT |
| | E11_CC_clipopt- | | |
| | LCDR3 | | |
| 346 | CH3_15- | artificial | NYWMN |
| | E11_CC_clipopt_EI- | | |
| | HCDR1 | | |
| 347 | CH3_15- | artificial | NIAYGVKGTNYNQKFQG |
| | E11_CC_clipopt_EI- | | |
| | HCDR2 | | |
| 348 | CH3_15- | artificial | RYFYVMDY |
| | E11_CC_clipopt_EI- | | |
| | HCDR3 | | |
| 349 | CH3_15- | artificial | RASQDISNYLN |
| | E11_CC_clipopt_EI- | | |
| | LCDR1 | | |
| 350 | CH3_15- | artificial | YTSRLHS |
| | El1_CC_clipopt_EI- | | |
| | LCDR2 | | |
| 351 | CH3_15- | artificial | VQYAQFPLT |
| | E11_CC_clipopt_EI- | | |
| | LCDR3 | | |
| 352 | CH3_G8A_6-B12- | artificial | SYPIN |
| | HCDR1 | | |
| 353 | CH3_G8A_6-B12 | artificial | VIWTGGGTNYASSVKG |
| | HCDR2 | | |
| 354 | CH3_G8A_6-B12 | artificial | SRGVYDFDGRGAMDY |
| | HCDR3 | | |
| 355 | CH3_G8A_6-B12- | artificial | KSSQSLLYSSNQKNYFA |
| | LCDR1 | | |
| 356 | CH3_G8A_6-B12- | artificial | WASTRES |
| | LCDR2 | | |
| 357 | CH3_G8A_6-B12- | artificial | QQYYSYPYT |
| | LCDR3 | | |
| 358 | CH3_G8A_6- | artificial | SYPIN |
| | B12_clipopt-HCDR1 | | |
| 359 | CH3_G8A_6- | artificial | VIWTGGGTNYASSVKG |
| | B12_clipopt-HCDR2 | | |
| 360 | CH3_G8A_6- | artificial | SRGVYDFDGRGAMDY |
| | B12_clipopt-HCDR3 | | |
| 361 | CH3_G8A_6- | artificial | KSSQSLLYSSNQKNYFA |
| | B12_clipopt-LCDR1 | | |
| 362 | CH3_G8A_6- | artificial | WASTRES |
| | B12_clipopt-LCDR2 | | |
| 363 | CH3_G8A_6- | artificial | QQYYSYPYT |
| | B12_clipopt-LCDR3 | | |
| 364 | CL_10D8_CC-HCDR1 | artificial | GYYMH |
| 365 | CL_10D8_CC-HCDR2 | artificial | WINPNSGGTKYAQKFQG |
| 366 | CL_10D8_CC-HCDR3 | artificial | DRITVAGTYYYYGMDV |
| 367 | CL_10D8_CC-LCDR1 | artificial | RASQGVNNWLA |
| 368 | CL_10D8_CC-LCDR2 | artificial | TASSLQS |
| 369 | CL_10D8_CC-LCDR3 | artificial | QQANSFPIT |
| 370 | CL_10D8_CC_clipopt- | artificial | GYYMH |
| | HCDR1 | | |
| 371 | CL_10D8_CC_clipopt- | artificial | WINPNSGGTKYAQKFQG |
| | HCDR2 | | |
| 372 | CL_10D8_CC_clipopt- | artificial | DRITVAGTYYYYGMDV |
| | HCDR3 | | |
| 373 | CL_10D8_CC_clipopt- | artificial | RASQGVNNWLA |
| | LCDR1 | | |
| 374 | CL_10D8_CC_clipopt- | artificial | TASSLQS |
| | LCDR2 | | |
| 375 | CL_10D8_CC_clipopt- | artificial | QQANSFPIT |
| | LCDR3 | | |
| 376 | CL1_7-D7_CC-HCDR1 | artificial | NYYMH |
| 377 | CL1_7-D7_CC-HCDR2 | artificial | WINPTSGGANYAQKFQG |
| 378 | CL1_7-D7_CC-HCDR3 | artificial | ESHAIQEGIWFDY |
| 379 | CL1_7-D7_CC-LCDR1 | artificial | RASQSISNYLN |
| 380 | CL1_7-D7_CC-LCDR2 | artificial | DASSLQS |
| 381 | CL1_7-D7_CC-LCDR3 | artificial | QQSYSFPLT |
| 382 | CL1_7-D7_CC_clipopt- | artificial | NYYMH |
| | HCDR1 | | |
| 383 | CL1_7-D7_CC_clipopt- | artificial | WINPTSGGANYAQKFQG |
| | HCDR2 | | |
| 384 | CL1_7-D7_CC_clipopt- | artificial | ESHAIQEGIWFDY |
| | HCDR3 | | |
| 385 | CL1_7-D7_CC_clipopt- | artificial | RASQSISNYLN |
| | LCDR1 | | |
| 386 | CL1_7-D7_CC_clipopt- | artificial | DASSLQS |
| | LCDR2 | | |
| 387 | CL1_7-D7_CC_clipopt- | artificial | QQSYSFPLT |
| | LCDR3 | | |
| 388 | CL6_3D4-01.G2_LH- | artificial | GYYMH |
| | HCDR1 | | |
| 389 | CL6_3D4-01.G2_LH- | artificial | WINPNSGETNYAQKFQG |
| | HCDR2 | | |
| 390 | CL6_3D4-01.G2_LH | artificial | DALIVVAPVTRDYYYYGMDV |
| | HCDR3 | | |
| 391 | CL6_3D4-01.G2_LH- | artificial | RASQSVSSSYLA |
| | LCDR1 | | |
| 392 | CL6_3D4-01.G2_LH- | artificial | GASSRAT |
| | LCDR2 | | |
| 393 | CL6_3D4-01.G2_LH- | artificial | QQYGSSPLT |
| | LCDR3 | | |
| 394 | CL6_3D4- | artificial | GYYMH |
| | 01.G2_LH_clipopt- | | |
| | HCDR1 | | |
| 395 | CL6_3D4- | artificial | WINPNSGETNYAQKFQG |
| | 01.G2_LH_clipopt- | | |
| | HCDR2 | | |
| 396 | CL6_3D4- | artificial | DALIVVAPVTRDYYYYGMDV |
| | 01.G2_LH_clipopt- | | |
| | HCDR3 | | |
| 397 | CL6_3D4- | artificial | RASQSVSSSYLA |
| | 01.G2_LH_clipopt- | | |
| | LCDR1 | | |
| 398 | CL6_3D4- | artificial | GASSRAT |
| | 01.G2_LH_clipopt- | | |
| | LCDR2 | | |
| 399 | CL6_3D4- | artificial | QQYGSSPLT |
| | 01.G2_LH_clipopt- | | |
| | LCDR3 | | |
| 400 | CS1_PDL241.12_LH_CC_ | artificial | SSWMN |
| | +R-HCDR1 | | |
| 401 | CS1_PDL241.12_LH_CC_ | artificial | RIYPGDADAKYNAKFKG |
| | +R-HCDR2 | | |
| 402 | CS1_PDL241.12_LH_CC_ | artificial | STMIATGAMDY |
| | +R-HCDR3 | | |
| 403 | CS1_PDL241.12_LH_CC_ | artificial | KASQDVSTAVA |
| | +R-LCDR1 | | |
| 404 | CS1_PDL241.12_LH_CC_ | artificial | SASYRYT |
| | +R-LCDR2 | | |
| 405 | CS1_PDL241.12_LH_CC_ | artificial | QQHYSTPPYT |
| | +R-LCDR3 | | |
| 406 | CS1_PDL241.12_LH_CC_ | artificial | SSWMN |
| | −R-HCDR1 | | |
| 407 | CS1_PDL241.12_LH_CC_ | artificial | RIYPGDADAKYNAKFKG |
| | −R-HCDR2 | | |
| 408 | CS1_PDL241.12_LH_CC_ | artificial | STMIATGAMDY |
| | −R-HCDR3 | | |
| 409 | CS1_PDL241.12_LH_CC_ | artificial | KASQDVSTAVA |
| | −R-LCDR1 | | |
| 410 | CS1_PDL241.12_LH_CC_ | artificial | SASYRYT |
| | −R-LCDR2 | | |
| 411 | CS1_PDL241.12_LH_CC_ | artificial | QQHYSTPPYT |
| | −R-LCDR3 | | |
| 412 | CS1_PDL241.12_LH_CC_ | artificial | SSWMN |
| | −R_clipopt-HCDR1 | | |
| 413 | CS1_PDL241.12_LH_CC_ | artificial | RIYPGDADAKYNAKFKG |
| | −R_clipopt-HCDR2 | | |
| 414 | CS1_PDL241.12_LH_CC_ | artificial | STMIATGAMDY |
| | −R_clipopt-HCDR3 | | |
| 415 | CS1_PDL241.12_LH_CC_ | artificial | KASQDVSTAVA |
| | −R_clipopt-LCDR1 | | |
| 416 | CS1_PDL241.12_LH_CC_ | artificial | SASYRYT |
| | −R_clipopt-LCDR2 | | |
| 417 | CS1_PDL241.12_LH_CC_ | artificial | QQHYSTPPYT |
| | −R_clipopt-LCDR3 | | |
| 418 | DL_8-A7_CC-HCDR1 | artificial | SYYWS |
| 419 | DL_8-A7_CC-HCDR2 | artificial | YVYYSGTTNYNPSLKS |
| 420 | DL_8-A7_CC-HCDR3 | artificial | IAVTGFYFDY |
| 421 | DL_8-A7_CC-LCDR1 | artificial | RASQRVNNNYLA |
| 422 | DL_8-A7_CC_LCDR2 | artificial | GASSRAT |
| 423 | DL_8-A7_CC-LCDR3 | artificial | QQYDRSPLT |
| 424 | DL_8-A7_CC_clipopt- | artificial | SYYWS |
| | HCDR1 | | |
| 425 | DL_8-A7_CC_clipopt- | artificial | YVYYSGTTNYNPSLKS |
| | HCDR2 | | |
| 426 | DL_8-A7_CC_clipopt- | artificial | IAVTGFYFDY |
| | HCDR3 | | |
| 427 | DL_8-A7_CC_clipopt- | artificial | RASQRVNNNYLA |
| | LCDR1 | | |
| 428 | DL_8-A7_CC_clipopt- | artificial | GASSRAT |
| | LCDR2 | | |
| 429 | DL_8-A7_CC_clipopt- | artificial | QQYDRSPLT |
| | LCDR3 | | |
| 430 | EGFRvIII_CC-HCDR1 | artificial | NYGMH |
| 431 | EGFRvIII_CC-HCDR2 | artificial | VIWYDGSDKYYADSVRG |
| 432 | EGFRvIII_CC-HCDR3 | artificial | DGYDILTGNPRDEDY |
| 433 | EGFRvIII_CC-LCDR1 | artificial | RSSQSLVHSDGNTYLS |
| 434 | EGFRvIII_CC-LCDR2 | artificial | RISRRES |
| 435 | EGFRvIII_CC-LCDR3 | artificial | MQSTHVPRT |
| 436 | EGFRvIII_CC_clipopt- | artificial | NYGMH |
| | HCDR1 | | |
| 437 | EGFRvIII_CC_clipopt- | artificial | VIWYDGSDKYYADSVRG |
| | HCDR2 | | |
| 438 | EGFRvIII_CC_clipopt- | artificial | DGYDILTGNPRDEDY |
| | HCDR3 | | |
| 439 | EGFRvIII_CC_clipopt- | artificial | RSSQSLVHSDGNTYLS |
| | LCDR1 | | |
| 440 | EGFRvIII_CC_clipopt- | artificial | RISRRES |
| | LCDR2 | | |
| 441 | EGFRvIII_CC_clipopt- | artificial | MQSTHVPRT |
| | LCDR3 | | |
| 442 | FL_7-A8_CC-HCDR1 | artificial | NARMGVS |
| 443 | FL_7-A8_CC-HCDR2 | artificial | HIFSNDEKSYSTSLKN |
| 444 | FL_7-A8_CC-HCDR3 | artificial | IVGYGSGWYGFFDY |
| 445 | FL_7-A8_CC-LCDR1 | artificial | RASQGIRNDLG |
| 446 | FL_7-A8_CC-LCDR2 | artificial | AASTLQS |
| 447 | FL_7-A8_CC-LCDR3 | artificial | LQHNSYPLT |
| 448 | FL_7-A8_CC_clipopt- | artificial | NARMGVS |
| | HCDR1 | | |
| 449 | FL_7-A8_CC_clipopt- | artificial | HIFSNDEKSYSTSLKN |
| | HCDR2 | | |
| 450 | FL_7-A8_CC_clipopt- | artificial | IVGYGSGWYGFFDY |
| | HCDR3 | | |
| 451 | FL_7-A8_CC_clipopt- | artificial | RASQGIRNDLG |
| | LCDR1 | | |
| 452 | FL_7-A8_CC_clipopt- | artificial | AASTLQS |
| | LCDR2 | | |
| 453 | FL_7-A8_CC_clipopt- | artificial | LQHNSYPLT |
| | LCDR3 | | |
| 454 | MA_10-B5_CC-HCDR1 | artificial | NAWMS |
| 455 | MA_10-B5_CC-HCDR2 | artificial | RIRSRSYGGTTDYAAPVKG |
| 456 | MA_10-B5_CC-HCDR3 | artificial | PSYSGSYYNYFSVMDV |
| 457 | MA_10-B5_CC-LCDR1 | artificial | RTSQSISSYLN |
| 458 | MA_10-B5_CC-LCDR2 | artificial | AASSLQG |
| 459 | MA_10-B5_CC-LCDR3 | artificial | QQTYSMPFT |
| 460 | MA_10-B5_CC_clipopt- | artificial | NAWMS |
| | HCDR1 | | |
| 461 | MA_10-B5_CC_clipopt- | artificial | RIRSRSYGGTTDYAAPVKG |
| | HCDR2 | | |
| 462 | MA_10-B5_CC_clipopt- | artificial | PSYSGSYYNYFSVMDV |
| | HCDR3 | | |
| 463 | MA_10-B5_CC_clipopt- | artificial | RTSQSISSYLN |
| | LCDR1 | | |
| 464 | MA_10-B5_CC_clipopt- | artificial | AASSLQG |
| | LCDR2 | | |
| 465 | MA_10-B5_CC_clipopt- | artificial | QQTYSMPFT |
| | LCDR3 | | |
| 466 | MA_3-G10_CC-HCDR1 | artificial | SYAMS |
| 467 | MA_3-G10_CC-HCDR2 | artificial | AISGSGGGTYYAASVKG |
| 468 | MA_3-G10_CC-HCDR3 | artificial | GKGVHLGFDY |
| 469 | MA_3-G10_CC-LCDR1 | artificial | GGNNIGSKSVH |
| 470 | MA_3-G10_CC-LCDR2 | artificial | DDNDRPS |
| 471 | MA_3-G10_CC-LCDR3 | artificial | QVWDYSGQRQV |
| 472 | MA_3-G10_CC_clipopt- | artificial | SYAMS |
| | HCDR1 | | |
| 473 | MA_3-G10_CC_clipopt- | artificial | AISGSGGGTYYAASVKG |
| | HCDR2 | | |
| 474 | MA_3-G10_CC_clipopt- | artificial | GKGVHLGFDY |
| | HCDR3 | | |
| 475 | MA_3-G10_CC_clipopt- | artificial | GGNNIGSKSVH |
| | LCDR1 | | |
| 476 | MA_3-G10_CC_clipopt- | artificial | DDNDRPS |
| | LCDR2 | | |
| 477 | MA_3-G10_CC_clipopt- | artificial | QVWDYSGQRQV |
| | LCDR3 | | |
| 478 | MS_15-B12_CC- | artificial | SSSYFWG |
| | HCDR1 | | |
| 479 | MS_15-B12_CC- | artificial | NIYYSGSSNYNPSLKS |
| | HCDR2 | | |
| 480 | MS_15-B12_CC- | artificial | LPRGDRDAFDI |
| | HCDR3 | | |
| 481 | MS_15-B12_CC | artificial | RASQGISNYLA |
| | LCDR1 | | |
| 482 | MS_15-B12_CC- | artificial | AASTLQS |
| | LCDR2 | | |
| 483 | MS_15-B12_CC- | artificial | QQSYSTPFT |
| | LCDR3 | | |
| 484 | MS_15- | artificial | SSSYFWG |
| | B12_CC_clipopt- | | |
| | HCDR1 | | |
| 485 | MS_15- | artificial | NIYYSGSSNYNPSLKS |
| | B12_CC_clipopt- | | |
| | HCDR2 | | |
| 486 | MS_15- | artificial | LPRGDRDAFDI |
| | B12_CC_clipopt- | | |
| | HCDR3 | | |
| 487 | MS_15- | artificial | RASQGISNYLA |
| | B12_CC_clipopt- | | |
| | LCDR1 | | |
| 488 | MS_15- | artificial | AASTLQS |
| | B12_CC_clipopt- | | |
| | LCDR2 | | |
| 489 | MS_15- | artificial | QQSYSTPFT |
| | B12_CC_clipopt- | | |
| | LCDR3 | | |
| 490 | MS_15- | artificial | SSSYFWG |
| | B12_CC_clipopt_EI- | | |
| | HCDR1 | | |
| 491 | MS_15- | artificial | NIYYSGSSNYNPSLKS |
| | B12_CC_clipopt_EI- | | |
| | HCDR2 | | |
| 492 | MS_15- | artificial | LPRGDRDAFDI |
| | B12_CC_clipopt_EI | | |
| | HCDR3 | | |
| 493 | MS_15- | artificial | RASQGISNYLA |
| | B12_CC_clipopt_EI- | | |
| | LCDR1 | | |
| 494 | MS_15- | artificial | AASTLQS |
| | B12_CC_clipopt_EI- | | |
| | LCDR2 | | |
| 495 | MS_15- | artificial | QQSYSTPFT |
| | B12_CC_clipopt_EI- | | |
| | LCDR3 | | |
| 496 | MS_5-F11-HCDR1 | artificial | DYYMT |
| 497 | MS_5-F11-HCDR2 | artificial | YISSSGSTIYYADSVKG |
| 498 | MS_5-F11-HCDR3 | artificial | DRNSHFDY |
| 499 | MS_5-F11-LCDR1 | artificial | RASQGINTWLA |
| 500 | MS_5-F11-LCDR2 | artificial | GASGLQS |
| 501 | MS_5-F11-LCDR3 | artificial | QQAKSFPRT |
| 502 | MS_5-F11_clipopt- | artificial | DYYMT |
| | HCDR1 | | |
| 503 | MS_5-F11_clipopt- | artificial | YISSSGSTIYYADSVKG |
| | HCDR2 | | |
| 504 | MS_5-F11_clipopt- | artificial | DRNSHFDY |
| | HCDR3 | | |
| 505 | MS_5-F11_clipopt- | artificial | RASQGINTWLA |
| | LCDR1 | | |
| 506 | MS_5-F11_clipopt- | artificial | GASGLQS |
| | LCDR2 | | |
| 507 | MS_5-F11_clipopt- | artificial | QQAKSFPRT |
| | LCDR3 | | |
| 508 | MU_8-B7_CC-HCDR1 | artificial | GYYWS |
| 509 | MU_8-B7_CC-HCDR2 | artificial | DIDASGSTKYNPSLKS |
| 510 | MU_8-B7_CC-HCDR3 | artificial | KKYSTVWSYFDN |
| 511 | MU_8-B7_CC-LCDR1 | artificial | SGDKLGDKYAS |
| 512 | MU_8-B7_CC-LCDR2 | artificial | QDRKRPS |
| 513 | MU_8-B7_CC-LCDR3 | artificial | QAWGSSTAV |
| 514 | MU_8-B7_CC_clipopt- | artificial | GYYWS |
| | HCDR1 | | |
| 515 | MU_8-B7_CC_clipopt- | artificial | DIDASGSTKYNPSLKS |
| | HCDR2 | | |
| 516 | MU_8-B7_CC_clipopt- | artificial | KKYSTVWSYFDN |
| | HCDR3 | | |
| 517 | MU_8-B7_CC_clipopt- | artificial | SGDKLGDKYAS |
| | LCDR1 | | |
| 518 | MU_8-B7_CC_clipopt- | artificial | QDRKRPS |
| | LCDR2 | | |
| 519 | MU_8-B7_CC_clipopt- | artificial | QAWGSSTAV |
| | LCDR3 | | |
| 520 | PM_76-B10-HCDR1 | artificial | DYYMY |
| 521 | PM_76-B10-HCDR2 | artificial | IISDGGYYTYYSDIIKG |
| 522 | PM_76-B10-HCDR3 | artificial | GFPLLRHGAMDY |
| 523 | PM_76-B10-LCDR1 | artificial | KASQNVDTNVA |
| 524 | PM_76-B10-LCDR2 | artificial | SASYRYS |
| 525 | PM_76-B10-LCDR3 | artificial | QQYDSYPYT |
| 526 | PM_76-B10.11_CC- | artificial | DYYMY |
| | HCDR1 | | |
| 527 | PM_76-B10.11_CC- | artificial | IISDGGYYTYYSDIIKG |
| | HCDR2 | | |
| 528 | PM_76-B10.11_CC- | artificial | GFPLLRHGAMDY |
| | HCDR3 | | |
| 529 | PM_76-B10.11_CC- | artificial | KASQNVDTNVA |
| | LCDR1 | | |
| 530 | PM_76-B10.11_CC- | artificial | SASYVYW |
| | LCDR2 | | |
| 531 | PM_76-B10.11_CC- | artificial | QQYDQQLIT |
| | LCDR3 | | |
| 532 | PM_76-B10.11_CC_GQ- | artificial | DYYMY |
| | HCDR1 | | |
| 533 | PM_76-B10.11_CC_GQ- | artificial | IISDGGYYTYYSDIIKG |
| | HCDR2 | | |
| 534 | PM_76-B10.11_CC_GQ- | artificial | GFPLLRHGAMDY |
| | HCDR3 | | |
| 535 | PM_76-B10.11_CC_GQ- | artificial | KASQNVDTNVA |
| | LCDR1 | | |
| 536 | PM_76-B10.11_CC_GQ- | artificial | SASYVYW |
| | LCDR2 | | |
| 537 | PM_76-B10.11_CC_GQ- | artificial | QQYDQQLIT |
| | LCDR3 | | |
| 538 | PM_76- | artificial | DYYMY |
| | B10.11_CC_clipopt- | | |
| | HCDR1 | | |
| 539 | PM_76- | artificial | IISDGGYYTYYSDIIKG |
| | B10.11_CC_clipopt- | | |
| | HCDR2 | | |
| 540 | PM_76- | artificial | GFPLLRHGAMDY |
| | B10.11_CC_clipopt- | | |
| | HCDR3 | | |
| 541 | PM_76- | artificial | KASQNVDTNVA |
| | B10.11_CC_clipopt- | | |
| | LCDR1 | | |
| 542 | PM_76- | artificial | SASYVYW |
| | B10.11_CC_clipopt- | | |
| | LCDR2 | | |
| 543 | PM_76- | artificial | QQYDQQLIT |
| | B10.11_CC_clipopt- | | |
| | LCDR3 | | |
| 544 | PM_76-B10_clipopt- | artificial | DYYMY |
| | HCDR1 | | |
| 545 | PM_76-B10_clipopt | artificial | IISDGGYYTYYSDIIKG |
| | HCDR2 | | |
| 546 | PM_76-B10_clipopt- | artificial | GFPLLRHGAMDY |
| | HCDR3 | | |
| 547 | PM_76-B10_clipopt- | artificial | KASQNVDTNVA |
| | LCDR1 | | |
| 548 | PM_76-B10_clipopt- | artificial | SASYRYS |
| | LCDR2 | | |
| 549 | PM_76-B10_clipopt- | artificial | QQYDSYPYT |
| | LCDR3 | | |
| 550 | 4F10.03-VH | artificial | EVQLVESGGGLVQPGGSLKLSCAASGFTFNKYAMNWVRQAPGKGMEWVA |
| | | | RIRSKYNNYATYYADAVKDRFTISRDDSKNTLYLQMNNLKTEDTAVYYC |
| | | | VRAGNFGTSYISYWAYWGQGTLVTVSS |
| 551 | 4F10.03-VL | artificial | QTVVTQEPSLTVSPGGTVTITCGSSTGAVTSGNYPNWVQKKPGQAPRGL |
| | | | IGGTKFLAPGTPARFSGSLSGGKAALTLSGVQPEDEAEYYCVLWYSNRW |
| | | | VFGSGTKLTVL |
| 552 | 4F10.03_CC-VH | artificial | EVQLVESGGGLVQPGGSLKLSCAASGFTFNKYAMNWVRQAPGKGMEWVA |
| | | | RIRSKYNNYATYYADAVKDRFTISRDDSKNTLYLQMNNLKTEDTAVYYC |
| | | | VRAGNFGTSYISYWAYCGQGTLVTVSS |
| 553 | 4F10.03_CC-VL | artificial | QTVVTQEPSLTVSPGGTVTITCGSSTGAVTSGNYPNWVQKKPGQCPRGL |
| | | | IGGTKFLAPGTPARFSGSLSGGKAALTLSGVQPEDEAEYYCVLWYSNRW |
| | | | VFGSGTKLTVL |
| 554 | 4F10.03_GQ-VH | artificial | EVQLVESGGGLVQPGGSLKLSCAASGFTFNKYAMNWVRQAPGKGMEWVA |
| | | | RIRSKYNNYATYYADAVKDRFTISRDDSKNTLYLQMNNLKTEDTAVYYC |
| | | | VRAGNFGTSYISYWAYWGQGTLVTVSS |
| 555 | 4F10.03_GQ-VL | artificial | QTVVTQEPSLTVSPGGTVTITCGSSTGAVTSGNYPNWVQKKPGQAPRGL |
| | | | IGGTKFLAPGTPARFSGSLSGGKAALTLSGVQPEDEAEYYCVLWYSNRW |
| | | | VFGSGTKLTVL |
| 556 | 4F10.03_GQ_CC-VH | artificial | EVQLVESGGGLVQPGGSLKLSCAASGFTFNKYAMNWVRQAPGKGMEWVA |
| | | | RIRSKYNNYATYYADAVKDRFTISRDDSKNTLYLQMNNLKTEDTAVYYC |
| | | | VRAGNFGTSYISYWAYCGQGTLVTVSS |
| 557 | 4F10.03_GQ_CC-VL | artificial | QTVVTQEPSLTVSPGGTVTITCGSSTGAVTSGNYPNWVQKKPGQCPRGL |
| | | | IGGTKFLAPGTPARFSGSLSGGKAALTLSGVQPEDEAEYYCVLWYSNRW |
| | | | VFGSGTKLTVL |
| 558 | 5C3.01-VH | artificial | EVQLVESGGGLVQPGGSLKLSCAASGFTFNKYAINWVRQAPGKGLEWVA |
| | | | RIRSKYNNYATYYADAVKDRFTISRDDSKNTVYLQMNNLKTEDTAVYYC |
| | | | ARAGNFGSSYISYWAYWGQGTLVTVSS |
| 559 | 5C3.01-VL | artificial | QTVVTQEPSLTVSPGGTVTITCGSSTGAVTSGNYPNWVQKKPGQAPRGL |
| | | | IGGTKFLAPGTPARFSGSLSGGKAALTLSGVQPEDEAEYYCVLWYSNRW |
| | | | VFGSGTKLTVL |
| 560 | 5C3.01_CC-VH | artificial | EVQLVESGGGLVQPGGSLKLSCAASGFTFNKYAINWVRQAPGKGLEWVA |
| | | | RIRSKYNNYATYYADAVKDRFTISRDDSKNTVYLQMNNLKTEDTAVYYC |
| | | | ARAGNFGSSYISYWAYCGQGTLVTVSS |
| 561 | 5C3.01_CC-VL | artificial | QTVVTQEPSLTVSPGGTVTITCGSSTGAVTSGNYPNWVQKKPGQCPRGL |
| | | | IGGTKFLAPGTPARFSGSLSGGKAALTLSGVQPEDEAEYYCVLWYSNRW |
| | | | VFGSGTKLTVL |
| 562 | 5C3.01_GQ-VH | artificial | EVQLVESGGGLVQPGGSLKLSCAASGFTFNKYAINWVRQAPGKGLEWVA |
| | | | RIRSKYNNYATYYADAVKDRFTISRDDSKNTVYLQMNNLKTEDTAVYYC |
| | | | ARAGNFGSSYISYWAYWGQGTLVTVSS |
| 563 | 5C3.01_GQ-VL | artificial | QTVVTQEPSLTVSPGGTVTITCGSSTGAVTSGNYPNWVQKKPGQAPRGL |
| | | | IGGTKFLAPGTPARFSGSLSGGKAALTLSGVQPEDEAEYYCVLWYSNRW |
| | | | VFGSGTKLTVL |
| 564 | 5C3.01_GQ_CC-VH | artificial | EVQLVESGGGLVQPGGSLKLSCAASGFTENKYAINWVRQAPGKGLEWVA |
| | | | RIRSKYNNYATYYADAVKDRFTISRDDSKNTVYLQMNNLKTEDTAVYYC |
| | | | ARAGNFGSSYISYWAYCGQGTLVTVSS |
| 565 | 5C3.01_GQ_CC-VL | artificial | QTVVTQEPSLTVSPGGTVTITCGSSTGAVTSGNYPNWVQKKPGQCPRGL |
| | | | IGGTKFLAPGTPARFSGSLSGGKAALTLSGVQPEDEAEYYCVLWYSNRW |
| | | | VFGSGTKLTVL |
| 566 | 5G6.05-VH | artificial | EVQLVESGGGLVQPGGSLKLSCAASGFTFNKYAMNWVRQAPGKGLEWVA |
| | | | RIRSKYNNYATYYAEAVKGRFTISRDDSKNTVYLQMNNLKTEDTAVYYC |
| | | | VRNENIGTSYISYWAYWGQGTLVTVSS |
| 567 | 5G6.05-VL | artificial | QTVVTQEPSLTVSPGGTVTITCGSSTGAVTSGNYPNWVQQKPGQAPRGL |
| | | | IGGTKFLAPGTPARFSGSLSGGKAALTLSGVQPEDEAEYYCVLWYSNRW |
| | | | VFGSGTKLTVL |
| 568 | 5G6.05_CC-VH | artificial | EVQLVESGGGLVQPGGSLKLSCAASGFTFNKYAMNWVRQAPGKGLEWVA |
| | | | RIRSKYNNYATYYAEAVKGRFTISRDDSKNTVYLQMNNLKTEDTAVYYC |
| | | | VRNENIGTSYISYWAYCGQGTLVTVSS |
| 569 | 5G6.05_CC-VL | artificial | QTVVTQEPSLTVSPGGTVTITCGSSTGAVTSGNYPNWVQQKPGQCPRGL |
| | | | IGGTKFLAPGTPARFSGSLSGGKAALTLSGVQPEDEAEYYCVLWYSNRW |
| | | | VFGSGTKLTVL |
| 570 | 5G6.05_GQ-VH | artificial | EVQLVESGGGLVQPGGSLKLSCAASGFTENKYAMNWVRQAPGKGLEWVA |
| | | | RIRSKYNNYATYYAEAVKGRFTISRDDSKNTVYLQMNNLKTEDTAVYYC |
| | | | VRNENIGTSYISYWAYWGQGTLVTVSS |
| 571 | 5G6.05_GQ-VL | artificial | QTVVTQEPSLTVSPGGTVTITCGSSTGAVTSGNYPNWVQQKPGQAPRGL |
| | | | IGGTKFLAPGTPARFSGSLSGGKAALTLSGVQPEDEAEYYCVLWYSNRW |
| | | | VFGSGTKLTVL |
| 572 | 5G6.05_GQ_CC-VH | artificial | EVQLVESGGGLVQPGGSLKLSCAASGFTENKYAMNWVRQAPGKGLEWVA |
| | | | RIRSKYNNYATYYAEAVKGRFTISRDDSKNTVYLQMNNLKTEDTAVYYC |
| | | | VRNENIGTSYISYWAYCGQGTLVTVSS |
| 573 | 5G6.05_GQ_CC-VL | artificial | QTVVTQEPSLTVSPGGTVTITCGSSTGAVTSGNYPNWVQQKPGQCPRGL |
| | | | IGGTKFLAPGTPARFSGSLSGGKAALTLSGVQPEDEAEYYCVLWYSNRW |
| | | | VFGSGTKLTVL |
| 574 | 6A8.02-VH | artificial | EVQLVESGGGLVQPGGSLKLSCAASGFTENKYAINWVREAPGKGLEWVA |
| | | | RIRSKYNNYATYYADAVKDRFTISRDDSKNTAYLQMNNLKTEDTAVYYC |
| | | | VRNANFGTSYISYFAYWGQGTLVTVSS |
| 575 | 6A8.02-VL | artificial | QTVVTQEPSLTVSPGGTVTLTCGSSTGAVTSGNYPNWVQKKPGQAPRGL |
| | | | IGGTKFLAPGTPARFSGSLLGGKAALTLSGVQPEDEAEYYCVLWYSNRW |
| | | | VFGSGTKLTVL |
| 576 | 6A8.02_CC-VH | artificial | EVQLVESGGGLVQPGGSLKLSCAASGFTFNKYAINWVREAPGKGLEWVA |
| | | | RIRSKYNNYATYYADAVKDRFTISRDDSKNTAYLQMNNLKTEDTAVYYC |
| | | | VRNANFGTSYISYFAYCGQGTLVTVSS |
| 577 | 6A8.02_CC-VL | artificial | QTVVTQEPSLTVSPGGTVTLTCGSSTGAVTSGNYPNWVQKKPGQCPRGL |
| | | | IGGTKFLAPGTPARFSGSLLGGKAALTLSGVQPEDEAEYYCVLWYSNRW |
| | | | VFGSGTKLTVL |
| 578 | 6A8.02_GQ-VH | artificial | EVQLVESGGGLVQPGGSLKLSCAASGFTFNKYAINWVREAPGKGLEWVA |
| | | | RIRSKYNNYATYYADAVKDRFTISRDDSKNTAYLQMNNLKTEDTAVYYC |
| | | | VRNANFGTSYISYFAYWGQGTLVTVSS |
| 579 | 6A8.02_GQ-VL | artificial | QTVVTQEPSLTVSPGGTVTLTCGSSTGAVTSGNYPNWVQKKPGQAPRGL |
| | | | IGGTKFLAPGTPARFSGSLLGGKAALTLSGVQPEDEAEYYCVLWYSNRW |
| | | | VFGSGTKLTVL |
| 580 | 6A8.02_GQ_CC-VH | artificial | EVQLVESGGGLVQPGGSLKLSCAASGFTFNKYAINWVREAPGKGLEWVA |
| | | | RIRSKYNNYATYYADAVKDRFTISRDDSKNTAYLQMNNLKTEDTAVYYC |
| | | | VRNANFGTSYISYFAYCGQGTLVTVSS |
| 581 | 6A8.02_GQ_CC-VL | artificial | QTVVTQEPSLTVSPGGTVTLTCGSSTGAVTSGNYPNWVQKKPGQCPRGL |
| | | | IGGTKFLAPGTPARFSGSLLGGKAALTLSGVQPEDEAEYYCVLWYSNRW |
| | | | VFGSGTKLTVL |
| 582 | 6H10.09-VH | artificial | EVQLVESGGGLVQPGGSLKLSCAASGFTFNKYAMNWVRQAPGKGMEWVA |
| | | | RIRSKYNNYATYYADAVKDRFTISRDDSKNTLYLQMNNLKTEDTAVYYC |
| | | | VRAGNFGSSYISYFAYWGQGTLVTVSS |
| 583 | 6H10.09-VL | artificial | QTVVTQEPSLTVSPGGTVTITCGSSTGAVTSGNYPNWIQKKPGQAPRGL |
| | | | IGGTKFLAPGTPARFSGSLEGGKAALTLSGVQPEDEAEYYCVLYYSNRW |
| | | | VFGSGTKLTVL |
| 584 | 6H10.09_CC-VH | artificial | EVQLVESGGGLVQPGGSLKLSCAASGFTENKYAMNWVRQAPGKGMEWVA |
| | | | RIRSKYNNYATYYADAVKDRFTISRDDSKNTLYLQMNNLKTEDTAVYYC |
| | | | VRAGNFGSSYISYFAYCGQGTLVTVSS |
| 585 | 6H10.09_CC-VL | artificial | QTVVTQEPSLTVSPGGTVTITCGSSTGAVTSGNYPNWIQKKPGQCPRGL |
| | | | IGGTKFLAPGTPARFSGSLEGGKAALTLSGVQPEDEAEYYCVLYYSNRW |
| | | | VFGSGTKLTVL |
| 586 | 6H10.09_GQ-VH | artificial | EVQLVESGGGLVQPGGSLKLSCAASGFTFNKYAMNWVRQAPGKGMEWVA |
| | | | RIRSKYNNYATYYADAVKDRFTISRDDSKNTLYLQMNNLKTEDTAVYYC |
| | | | VRAGNFGSSYISYFAYWGQGTLVTVSS |
| 587 | 6H10.09_GQ-VL | artificial | QTVVTQEPSLTVSPGGTVTITCGSSTGAVTSGNYPNWIQKKPGQAPRGL |
| | | | IGGTKFLAPGTPARFSGSLEGGKAALTLSGVQPEDEAEYYCVLYYSNRW |
| | | | VFGSGTKLTVL |
| 588 | 6H10.09_GQ_CC-VH | artificial | EVQLVESGGGLVQPGGSLKLSCAASGFTFNKYAMNWVRQAPGKGMEWVA |
| | | | RIRSKYNNYATYYADAVKDRFTISRDDSKNTLYLQMNNLKTEDTAVYYC |
| | | | VRAGNFGSSYISYFAYCGQGTLVTVSS |
| 589 | 6H10.09_GQ_CC-VL | artificial | QTVVTQEPSLTVSPGGTVTITCGSSTGAVTSGNYPNWIQKKPGQCPRGL |
| | | | IGGTKFLAPGTPARFSGSLEGGKAALTLSGVQPEDEAEYYCVLYYSNRW |
| | | | VFGSGTKLTVL |
| 590 | I2C-VH | artificial | EVQLVESGGGLVQPGGSLKLSCAASGFTFNKYAMNWVRQAPGKGLEWVA |
| | | | RIRSKYNNYATYYADSVKDRFTISRDDSKNTAYLQMNNLKTEDTAVYYC |
| | | | VRHGNFGNSYISYWAYWGQGTLVTVSS |
| 591 | I2C-VL | artificial | QTVVTQEPSLTVSPGGTVTLTCGSSTGAVTSGNYPNWVQQKPGQAPRGL |
| | | | IGGTKFLAPGTPARFSGSLLGGKAALTLSGVQPEDEAEYYCVLWYSNRW |
| | | | VFGGGTKLTVL |
| 592 | I2C_CC-VH | artificial | EVQLVESGGGLVQPGGSLKLSCAASGFTFNKYAMNWVRQAPGKGLEWVA |
| | | | RIRSKYNNYATYYADSVKDRFTISRDDSKNTAYLQMNNLKTEDTAVYYC |
| | | | VRHGNFGNSYISYWAYCGQGTLVTVSS |
| 593 | I2C_CC-VL | artificial | QTVVTQEPSLTVSPGGTVTLTCGSSTGAVTSGNYPNWVQQKPGQCPRGL |
| | | | IGGTKFLAPGTPARFSGSLLGGKAALTLSGVQPEDEAEYYCVLWYSNRW |
| | | | VFGGGTKLTVL |
| 594 | I2C_GQ-VH | artificial | EVQLVESGGGLVQPGGSLKLSCAASGFTFNKYAMNWVRQAPGKGLEWVA |
| | | | RIRSKYNNYATYYADSVKDRFTISRDDSKNTAYLQMNNLKTEDTAVYYC |
| | | | VRHGNFGNSYISYWAYWGQGTLVTVSS |
| 595 | I2C_GQ-VL | artificial | QTVVTQEPSLTVSPGGTVTLTCGSSTGAVTSGNYPNWVQQKPGQAPRGL |
| | | | IGGTKFLAPGTPARFSGSLLGGKAALTLSGVQPEDEAEYYCVLWYSNRW |
| | | | VFGGGTKLTVL |
| 596 | I2C_GQ_CC-VH | artificial | EVQLVESGGGLVQPGGSLKLSCAASGFTFNKYAMNWVRQAPGKGLEWVA |
| | | | RIRSKYNNYATYYADSVKDRFTISRDDSKNTAYLQMNNLKTEDTAVYYC |
| | | | VRHGNFGNSYISYWAYCGQGTLVTVSS |
| 597 | I2C_GQ_CC-VL | artificial | QTVVTQEPSLTVSPGGTVTLTCGSSTGAVTSGNYPNWVQQKPGQCPRGL |
| | | | IGGTKFLAPGTPARFSGSLLGGKAALTLSGVQPEDEAEYYCVLWYSNRW |
| | | | VFGGGTKLTVL |
| 598 | BC_A7_27-C4-G7-VH | artificial | QVQLVQSGAEVKKPGASVKVSCKASGYTFTNHIIHWVRQAPGQGLEWMG |
| | | | YINPYPGYHAYNEKFQGRATMTSDTSTSTVYMELSSLRSEDTAVYYCAR |
| | | | DGYYRDTDVLDYWGQGTLVTVSS |
| 599 | BC_A7_27-C4-G7-VL | artificial | DIQMTQSPSSLSASVGDRVTITCQASQDISNYLNWYQQKPGKAPKLLIY |
| | | | YTSRLHTGVPSRFSGSGSGTDFTFTISSLEPEDIATYYCQQGNTLPWTF |
| | | | GQGTKVEIK |
| 600 | BC_A7_27-C4-G7_CC- | artificial | QVQLVQSGAEVKKPGASVKVSCKASGYTFTNHIIHWVRQAPGQCLEWMG |
| | VH | | YINPYPGYHAYNEKFQGRATMTSDTSTSTVYMELSSLRSEDTAVYYCAR |
| | | | DGYYRDTDVLDYWGQGTLVTVSS |
| 601 | BC_A7_27-C4-G7_CC- | artificial | DIQMTQSPSSLSASVGDRVTITCQASQDISNYLNWYQQKPGKAPKLLIY |
| | VL | | YTSRLHTGVPSRFSGSGSGTDFTFTISSLEPEDIATYYCQQGNTLPWTF |
| | | | GCGTKVEIK |
| 602 | BC_A7_27-C4- | artificial | QVQLVQSGAEVKKPGASVKVSCKASGYTFTNHIIHWVRQAPGQCLEWMG |
| | G7_CC_clipopt-VH | | YINPYPGYHAYNEKFQGRATMTSDTSTSTVYMELSSLRSEDTAVYYCAR |
| | | | DGYYRDTDVLDYWGQGTLVTVSS |
| 603 | BC_A7_27-C4- | artificial | EIQMTQSPSSLSASVGDRVTITCQASQDISNYLNWYQQKPGKAPKLLIY |
| | G7_CC_clipopt-VL | | YTSRLHTGVPSRFSGSGSGTDFTFTISSLEPEDIATYYCQQGNTLPWTF |
| | | | GCGTKVEIK |
| 604 | BC_A7_27-C4- | artificial | QVQLVQSGAEVKKPGASVKVSCKASGYTFTNHIIHWVRQAPGQGLEWMG |
| | G7_clipopt-VH | | YINPYPGYHAYNEKFQGRATMTSDTSTSTVYMELSSLRSEDTAVYYCAR |
| | | | DGYYRDTDVLDYWGQGTLVTVSS |
| 605 | BC_A7_27-C4- | artificial | EIQMTQSPSSLSASVGDRVTITCQASQDISNYLNWYQQKPGKAPKLLIY |
| | G7_clipopt-VL | | YTSRLHTGVPSRFSGSGSGTDFTFTISSLEPEDIATYYCQQGNTLPWTF |
| | | | GQGTKVEIK |
| 606 | CD123_24-B4-f_NK_CC- | artificial | EVQLLESGGGLVQPGGSLRLSCAASGFTFSHYAMSWVRQAPGKCLEWVS |
| | VH | | AVSGGGDKTLYADAVKGRFTISRDNSKNTLFLQMNSLRAEDTAIYYCAR |
| | | | LRGFYYGMDVWGQGTTVTVSS |
| 607 | CD123_24-B4-f_NK_CC- | artificial | DIVLTQSPLSLPVTPGEPASISCRSSQSLLHSNKYNYLDWYLQKPGQSP |
| | VL | | QLLIYLGSNRASGVPDRFSGSGSGTDFTLKISRVEAEDVGVYYCMQALQ |
| | | | TPPITFGCGTRLEIK |
| 608 | CD123_24-B4- | artificial | EVQLLESGGGLVQPGGSLRLSCAASGFTFSHYAMSWVRQAPGKCLEWVS |
| | f_NK_CC_clipopt- | | AVSGGGDKTLYADAVKGRFTISRDNSKNTLFLQMNSLRAEDTAIYYCAR |
| | VH | | LRGFYYGMDVWGQGTTVTVSS |
| 609 | CD123_24-B4- | artificial | EIVLTQSPLSLPVTPGEPASISCRSSQSLLHSNKYNYLDWYLQKPGQSP |
| | f_NK_CC_clipopt- | | QLLIYLGSNRASGVPDRFSGSGSGTDFTLKISRVEAEDVGVYYCMQALQ |
| | VL | | TPPITFGCGTRLEIK |
| 610 | CD19_97-G1RE- | artificial | QVQLVESGGGVVQPGRSLRLSCAASGFTFSSYGMHWVRQAPGKCLEWVA |
| | C2_LH_CC-VH | | VISYEGSNKYYAESVKGRFTISRDNSKNTLYLQMNSLRDEDTAVYYCAR |
| | | | DRGTIFGNYGLEVWGQGTTVTVSS |
| 611 | CD19_97-G1RE- | artificial | DIVMTQSPLSLPVISGEPASISCRSSQSLLHKNAFNYLDWYLQKPGQSP |
| | C2_LH_CC-VL | | QLLIYLGSNRASGVPDRFSGSGSGTDFTLKISRVEAEDVGVYYCMQALQ |
| | | | TPFTFGCGTKVDIK |
| 612 | CD19_97-G1RE- | artificial | QVQLVESGGGVVQPGRSLRLSCAASGFTFSSYGMHWVRQAPGKCLEWVA |
| | C2_LH_CC_clipopt- | | VISYEGSNKYYAESVKGRFTISRDNSKNTLYLQMNSLRDEDTAVYYCAR |
| | VH | | DRGTIFGNYGLEVWGQGTTVTVSS |
| 613 | CD19_97-G1RE- | artificial | DIVMTQSPLSLPVISGEPASISCRSSQSLLHKNAFNYLDWYLQKPGQSP |
| | C2_LH_CC_clipopt | | QLLIYLGSNRASGVPDRFSGSGSGTDFTLKISRVEAEDVGVYYCMQALQ |
| | VL | | TPFTFGCGTKVDIK |
| 614 | CD33_E11-VH | artificial | QVQLVQSGAEVKKPGESVKVSCKASGYTFTNYGMNWVKQAPGQGLEWMG |
| | | | WINTYTGEPTYADKFQGRVTMTTDTSTSTAYMEIRNLGGDDTAVYYCAR |
| | | | WSWSDGYYVYFDYWGQGTSVTVSS |
| 615 | CD33_E11-VL | artificial | DIVMTQSPDSLTVSLGERTTINCKSSQSVLDSSTNKNSLAWYQQKPGQP |
| | | | PKLLLSWASTRESGIPDRFSGSGSGTDFTLTIDSPQPEDSATYYCQQSA |
| | | | HFPITFGQGTRLEIK |
| 616 | CD33_E11_CC-VH | artificial | QVQLVQSGAEVKKPGESVKVSCKASGYTFTNYGMNWVKQAPGQCLEWMG |
| | | | WINTYTGEPTYADKFQGRVTMTTDTSTSTAYMEIRNLGGDDTAVYYCAR |
| | | | WSWSDGYYVYFDYWGQGTSVTVSS |
| 617 | CD33_E11_CC-VL | artificial | DIVMTQSPDSLTVSLGERTTINCKSSQSVLDSSTNKNSLAWYQQKPGQP |
| | | | PKLLLSWASTRESGIPDRFSGSGSGTDFTLTIDSPQPEDSATYYCQQSA |
| | | | HFPITFGCGTRLEIK |
| 618 | CD33_E11_CC_GQ-VH | artificial | QVQLVQSGAEVKKPGESVKVSCKASGYTFTNYGMNWVKQAPGQCLEWMG |
| | | | WINTYTGEPTYADKFQGRVTMTTDTSTSTAYMEIRNLGGDDTAVYYCAR |
| | | | WSWSDGYYVYFDYWGQGTSVTVSS |
| 619 | CD33_E11_CC_GQ-VL | artificial | DIVMTQSPDSLTVSLGERTTINCKSSQSVLDSSTNKNSLAWYQQKPGQP |
| | | | PKLLLSWASTRESGIPDRFSGSGSGTDFTLTIDSPQPEDSATYYCQQSA |
| | | | HFPITFGCGTRLEIK |
| 620 | CD33_E11_CC_GR-VH | artificial | QVQLVQSGAEVKKPGESVKVSCKASGYTFTNYGMNWVKQAPGQCLEWMG |
| | | | WINTYTGEPTYADKFQGRVTMTTDTSTSTAYMEIRNLGGDDTAVYYCAR |
| | | | WSWSDGYYVYFDYWGQGTSVTVSS |
| 621 | CD33_E11_CC_GR-VL | artificial | DIVMTQSPDSLTVSLGERTTINCKSSQSVLDSSTNKNSLAWYQQKPGQP |
| | | | PKLLLSWASTRESGIPDRFSGSGSGTDFTLTIDSPQPEDSATYYCQQSA |
| | | | HFPITFGCGTRLEIK |
| 622 | CD33_E11_CC_clipopt- | artificial | QVQLVQSGAEVKKPGESVKVSCKASGYTFTNYGMNWVKQAPGQCLEWMG |
| | VH | | WINTYTGEPTYADKFQGRVTMTTDTSTSTAYMEIRNLGGDDTAVYYCAR |
| | | | WSWSDGYYVYFDYWGQGTSVTVSS |
| 623 | CD33_E11_CC_clipopt- | artificial | EIVMTQSPDSLTVSLGERTTINCKSSQSVLDSSTNKNSLAWYQQKPGQP |
| | VL | | PKLLLSWASTRESGIPDRFSGSGSGTDFTLTIDSPQPEDSATYYCQQSA |
| | | | HFPITFGCGTRLEIK |
| 624 | CD33_E11 clipopt- | artificial | QVQLVQSGAEVKKPGESVKVSCKASGYTFTNYGMNWVKQAPGQGLEWMG |
| | VH | | WINTYTGEPTYADKFQGRVTMTTDTSTSTAYMEIRNLGGDDTAVYYCAR |
| | | | WSWSDGYYVYFDYWGQGTSVTVSS |
| 625 | CD33_E11 clipopt- | artificial | EIVMTQSPDSLTVSLGERTTINCKSSQSVLDSSTNKNSLAWYQQKPGQP |
| | VL | | PKLLLSWASTRESGIPDRFSGSGSGTDFTLTIDSPQPEDSATYYCQQSA |
| | | | HFPITFGQGTRLEIK |
| 626 | CD70_1_C7D_CC-VH | artificial | EVQLLESGGGMVQPGGSLRLSCAASGFTFSTYAMSWVRQAPGKCLEWVS |
| | | | AISGSGGRTFYAESVEGRFTISRDNSKNTLYLQMNSLRAEDTAVYYCAK |
| | | | HDYSNYPYFDYWGQGTLVTVSS |
| 627 | CD70_1_C7D_CC-VL | artificial | EIVLTQSPGTLSLSPGERATLSCRASQSVRSTYLAWYQQKPGQAPRLLI |
| | | | YGASSRATGIPDRESGSGSGTDFTLTISRLEPEDFAVYSCQQYGDLPFT |
| | | | FGCGTKLEIK |
| 628 | CD70_1_C7D_CC_ | artificial | EVQLLESGGGMVQPGGSLRLSCAASGFTFSTYAMSWVRQAPGKCLEWVS |
| | clipopt-VH | | AISGSGGRTFYAESVEGRFTISRDNSKNTLYLQMNSLRAEDTAVYYCAK |
| | | | HDYSNYPYFDYWGQGTLVTVSS |
| 629 | CD70_1_C7D_CC_ | artificial | EIVLTQSPGTLSLSPGERATLSCRASQSVRSTYLAWYQQKPGQAPRLLI |
| | clipopt-VL | | YGASSRATGIPDRESGSGSGTDETLTISRLEPEDFAVYSCQQYGDLPFT |
| | | | FGCGTKLEIK |
| 630 | CH19_2G6.007_CC- | artificial | QVQLVESGGGVVQPGGSLRLSCAASGFTFSSYGMHWVRQAPGKCLEWVA |
| | VH | | FIWYEGSNKYYAESVKDRFTISRDNSKNTLYLQMNSLRAEDTAVYYCAR |
| | | | RAGIIGTIGYYYGMDVWGQGTTVTVSS |
| 631 | CH19_2G6.007_CC- | artificial | SYELTQPPSVSVSPGQTASITCSGDRLGEKYTSWYQQRPGQSPLLVIYQ |
| | VL | | DTKRPSGIPERFSGSNSGNTATLTISGTQAMDEADYYCQAWESSTVVFG |
| | | | CGTKLTVL |
| 632 | CH19_2G6.007_CC_ | artificial | QVQLVESGGGVVQPGGSLRLSCAASGFTFSSYGMHWVRQAPGKCLEWVA |
| | clipopt-VH | | FIWYEGSNKYYAESVKDRFTISRDNSKNTLYLQMNSLRAEDTAVYYCAR |
| | | | RAGIIGTIGYYYGMDVWGQGTTVTVSS |
| 633 | CH19_2G6.007_CC_ | artificial | SYELTQPPSVSVSPGQTASITCSGDRLGEKYTSWYQQRPGQSPLLVIYQ |
| | clipopt-VL | | DTKRPSGIPERFSGSNSGNTATLTISGTQAMDEADYYCQAWESSTVVFG |
| | | | CGTKLTVL |
| 634 | CH3_15-E11_CC-VH | artificial | QVQLVQSGAEVKKPGASVKVSCKASGYTFTNYWMNWVRQAPGQCLEWMG |
| | | | NIAYGVKGTNYNQKFQGRVTMTVDTSSSTAYMELSRLRSDDTAVYYCAT |
| | | | RYFYVMDYWGQGTLVTVSS |
| 635 | CH3_15-E11_CC-VL | artificial | DIQMTQSPSSLSASVGDRVTITCRASQDISNYLNWYQQKPGKVPKLLIY |
| | | | YTSRLHSGVPSRFSGSGSGTDFTLTISSLQPEDVATYYCVQYAQFPLTF |
| | | | GCGTKVEIK |
| 636 | CH3_15- | artificial | QVQLVQSGAEVKKPGASVKVSCKASGYTFTNYWMNWVRQAPGQCLEWMG |
| | E11_CC_clipopt-VH | | NIAYGVKGTNYNQKFQGRVTMTVDTSSSTAYMELSRLRSDDTAVYYCAT |
| | | | RYFYVMDYWGQGTLVTVSS |
| 637 | CH3_15 | artificial | DIQMTQSPSSLSASVGDRVTITCRASQDISNYLNWYQQKPGKVPKLLIY |
| | E11_CC_clipopt-VL | | YTSRLHSGVPSRFSGSGSGTDFTLTISSLQPEDVATYYCVQYAQFPLTF |
| | | | GCGTKVEIK |
| 638 | CH3_15- | artificial | QVQLVQSGAEVKKPGASVKVSCKASGYTFTNYWMNWVRQAPGQCLEWMG |
| | E11_CC_clipopt_EI- | | NIAYGVKGTNYNQKFQGRVTMTVDTSSSTAYMELSRLRSDDTAVYYCAT |
| | VH | | RYFYVMDYWGQGTLVTVSS |
| 639 | CH3_15- | artificial | EIQMTQSPSSLSASVGDRVTITCRASQDISNYLNWYQQKPGKVPKLLIY |
| | E11_CC_clipopt_EI- | | YTSRLHSGVPSRFSGSGSGTDFTLTISSLQPEDVATYYCVQYAQFPLTF |
| | VL | | GCGTKVEIK |
| 640 | CH3_G8A_6-B12-VH | artificial | EVQLLESGGGLVQPGGSLRLSCAASGFSFSSYPINWVRQAPGKGLEWVG |
| | | | VIWTGGGTNYASSVKGRFTISRDNSKNTVYLQMNSLRAEDTAVYYCAKS |
| | | | RGVYDFDGRGAMDYWGQGTLVTVSS |
| 641 | CH3_G8A_6-B12-VL | artificial | DIVMTQSPDSLAVSLGERATINCKSSQSLLYSSNQKNYFAWYQQKPGQP |
| | | | PKLLIYWASTRESGVPDRFSGSGSGTDFTLTISSLQAEDVAVYYCQQYY |
| | | | SYPYTFGQGTKLEIK |
| 642 | CH3_G8A_6- | artificial | EVQLLESGGGLVQPGGSLRLSCAASGFSFSSYPINWVRQAPGKGLEWVG |
| | B12_clipopt-VH | | VIWTGGGTNYASSVKGRFTISRDNSKNTVYLQMNSLRAEDTAVYYCAKS |
| | | | RGVYDFDGRGAMDYWGQGTLVTVSS |
| 643 | CH3_G8A_6- | artificial | EIVMTQSPDSLAVSLGERATINCKSSQSLLYSSNQKNYFAWYQQKPGQP |
| | B12_clipopt-VL | | PKLLIYWASTRESGVPDRFSGSGSGTDFTLTISSLQAEDVAVYYCQQYY |
| | | | SYPYTFGQGTKLEIK |
| 644 | CL_10D8_CC-VH | artificial | QVQLVQSGAEVKKPGASVKVSCKASGYTFTGYYMHWVRQAPGQCLEWMG |
| | | | WINPNSGGTKYAQKFQGRVTMTRDTSISTAYMELSRLRSDDTAVYYCAR |
| | | | DRITVAGTYYYYGMDVWGQGTTVTVSS |
| 645 | CL_10D8_CC-VL | artificial | DIQMTQSPSSVSASVGDRVTITCRASQGVNNWLAWYQQKPGKAPKLLIY |
| | | | TASSLQSGVPSRFSGSGSGTDFTLTIRSLQPEDFATYYCQQANSFPITF |
| | | | GCGTRLEIK |
| 646 | CL_10D8_CC_clipopt- | artificial | QVQLVQSGAEVKKPGASVKVSCKASGYTFTGYYMHWVRQAPGQCLEWMG |
| | VH | | WINPNSGGTKYAQKFQGRVTMTRDTSISTAYMELSRLRSDDTAVYYCAR |
| | | | DRITVAGTYYYYGMDVWGQGTTVTVSS |
| 647 | CL_10D8_CC_clipopt- | artificial | EIQMTQSPSSVSASVGDRVTITCRASQGVNNWLAWYQQKPGKAPKLLIY |
| | VL | | TASSLQSGVPSRFSGSGSGTDFTLTIRSLQPEDFATYYCQQANSFPITF |
| | | | GCGTRLEIK |
| 648 | CL1_7-D7_CC-VH | artificial | QVQLVQSGAEVKKPGASVKVSCKASGYTFTNYYMHWVRQAPGQCLEWMG |
| | | | WINPTSGGANYAQKFQGRVTMTRDTSISTAYMELSRLRSDDTAVYFCAR |
| | | | ESHAIQEGIWFDYWGQGTLVTVSS |
| 649 | CL1_7-D7_CC-VL | artificial | DIQMTQSPSSLSASVGDRVTISCRASQSISNYLNWYQQKPGKAPKLLIY |
| | | | DASSLQSGVPSRFSGSGSGTDFTLTISSLQPEDFATYYCQQSYSFPLTF |
| | | | GCGTKVEIK |
| 650 | CL1_7-D7_CC_clipopt- | artificial | QVQLVQSGAEVKKPGASVKVSCKASGYTFTNYYMHWVRQAPGQCLEWMG |
| | VH | | WINPTSGGANYAQKFQGRVTMTRDTSISTAYMELSRLRSDDTAVYFCAR |
| | | | ESHAIQEGIWFDYWGQGTLVTVSS |
| 651 | CL1_7-D7_CC_clipopt- | artificial | EIQMTQSPSSLSASVGDRVTISCRASQSISNYLNWYQQKPGKAPKLLIY |
| | VL | | DASSLQSGVPSRFSGSGSGTDFTLTISSLQPEDFATYYCQQSYSFPLTF |
| | | | GCGTKVEIK |
| 652 | CL6_3D4-01.G2_LH- | artificial | QVQLVQSGAEVKKPGASVKVSCKASGYTFTGYYMHWVRQAPGQCLEWMG |
| | VH | | WINPNSGETNYAQKFQGRVTMTRDTSISTAYMELSRLRSDDTAVYYCAR |
| | | | DALIVVAPVTRDYYYYGMDVWGQGTTVTVSS |
| 653 | CL6_3D4-01.G2_LH- | artificial | EIVLTQSPGTLSLSPGERATLSCRASQSVSSSYLAWYQQKPGQAPRLLI |
| | VL | | YGASSRATGIPDRESGSGSGTDFTLTISRLEPEDFAVYYCQQYGSSPLT |
| | | | FGCGTKLEIK |
| 654 | CL6_3D4- | artificial | QVQLVQSGAEVKKPGASVKVSCKASGYTFTGYYMHWVRQAPGQCLEWMG |
| | 01.G2_LH_clipopt- | | WINPNSGETNYAQKFQGRVTMTRDTSISTAYMELSRLRSDDTAVYYCAR |
| | VH | | DALIVVAPVTRDYYYYGMDVWGQGTTVTVSS |
| 655 | CL6_3D4- | artificial | EIVLTQSPGTLSLSPGERATLSCRASQSVSSSYLAWYQQKPGQAPRLLI |
| | 01.G2_LH_clipopt- | | YGASSRATGIPDRFSGSGSGTDFTLTISRLEPEDFAVYYCQQYGSSPLT |
| | VL | | FGCGTKLEIK |
| 656 | CS1_PDL241.12_LH_CC_ | artificial | QVQLVQSGAEVKKPGASVKVSCKASGYAFSSSWMNWVRQAPGQCLEWIG |
| | +R-VH | | RIYPGDADAKYNAKFKGKATLTADKSTSTAYMELSSLRSEDTAVYYCAR |
| | | | STMIATGAMDYWGQGTLVTVSS |
| 657 | CS1_PDL241.12_LH_CC_ | artificial | DIQMTQSPSSLSASVGDRVTITCKASQDVSTAVAWYQQKPGKAPKLLIY |
| | +R-VL | | SASYRYTGVPDRFTGSGSGTDFTLTISSLQPEDFATYYCQQHYSTPPYT |
| | | | FGCGTKVEIKR |
| 658 | CS1_PDL241.12_LH_CC_ | artificial | QVQLVQSGAEVKKPGASVKVSCKASGYAFSSSWMNWVRQAPGQCLEWIG |
| | −R-VH | | RIYPGDADAKYNAKFKGKATLTADKSTSTAYMELSSLRSEDTAVYYCAR |
| | | | STMIATGAMDYWGQGTLVTVSS |
| 659 | CS1_PDL241.12_LH_CC_ | artificial | DIQMTQSPSSLSASVGDRVTITCKASQDVSTAVAWYQQKPGKAPKLLIY |
| | −R-VL | | SASYRYTGVPDRFTGSGSGTDFTLTISSLQPEDFATYYCQQHYSTPPYT |
| | | | FGCGTKVEIK |
| 660 | CS1_PDL241.12_LH_CC_ | artificial | QVQLVQSGAEVKKPGASVKVSCKASGYAFSSSWMNWVRQAPGQCLEWIG |
| | −R_clipopt-VH | | RIYPGDADAKYNAKFKGKATLTADKSTSTAYMELSSLRSEDTAVYYCAR |
| | | | STMIATGAMDYWGQGTLVTVSS |
| 661 | CS1_PDL241.12_LH_CC_ | artificial | DIQMTQSPSSLSASVGDRVTITCKASQDVSTAVAWYQQKPGKAPKLLIY |
| | −R_clipopt-VL | | SASYRYTGVPDRFTGSGSGTDFTLTISSLQPEDFATYYCQQHYSTPPYT |
| | | | FGCGTKVEIK |
| 662 | DL_8-A7_CC-VH | artificial | QVQLQESGPGLVKPSETLSLTCTVSGGSISSYYWSWIRQPPGKCLEWIG |
| | | | YVYYSGTTNYNPSLKSRVTISVDTSKNQFSLKLSSVTAADTAVYYCASI |
| | | | AVTGFYFDYWGQGTLVTVSS |
| 663 | DL_8-A7_CC-VL | artificial | EIVLTQSPGTLSLSPGERVTLSCRASQRVNNNYLAWYQQRPGQAPRLLI |
| | | | YGASSRATGIPDRESGSGSGTDFTLTISRLEPEDFAVYYCQQYDRSPLT |
| | | | FGCGTKLEIK |
| 664 | DL_8-A7_CC_clipopt- | artificial | QVQLQESGPGLVKPSETLSLTCTVSGGSISSYYWSWIRQPPGKCLEWIG |
| | VH | | YVYYSGTTNYNPSLKSRVTISVDTSKNQFSLKLSSVTAADTAVYYCASI |
| | | | AVTGFYFDYWGQGTLVTVSS |
| 665 | DL_8-A7_CC_clipopt- | artificial | EIVLTQSPGTLSLSPGERVTLSCRASQRVNNNYLAWYQQRPGQAPRLLI |
| | VL | | YGASSRATGIPDRESGSGSGTDFTLTISRLEPEDFAVYYCQQYDRSPLT |
| | | | FGCGTKLEIK |
| 666 | EGFRvIII_CC-VH | artificial | QVQLVESGGGVVQSGRSLRLSCAASGFTFRNYGMHWVRQAPGKCLEWVA |
| | | | VIWYDGSDKYYADSVRGRFTISRDNSKNTLYLQMNSLRAEDTAVYYCAR |
| | | | DGYDILTGNPRDFDYWGQGTLVTVSS |
| 667 | EGFRvIII_CC-VL | artificial | DTVMTQTPLSSHVTLGQPASISCRSSQSLVHSDGNTYLSWLQQRPGQPP |
| | | | RLLIYRISRRFSGVPDRFSGSGAGTDFTLEISRVEAEDVGVYYCMQSTH |
| | | | VPRTFGCGTKVEIK |
| 668 | EGFRvIII_CC_clipopt- | artificial | QVQLVESGGGVVQSGRSLRLSCAASGFTFRNYGMHWVRQAPGKCLEWVA |
| | VH | | VIWYDGSDKYYADSVRGRFTISRDNSKNTLYLQMNSLRAEDTAVYYCAR |
| | | | DGYDILTGNPRDFDYWGQGTLVTVSS |
| 669 | EGFRvIII_CC_clipopt- | artificial | DTVMTQTPLSSHVTLGQPASISCRSSQSLVHSDGNTYLSWLQQRPGQPP |
| | VL | | RLLIYRISRRFSGVPDRESGSGAGTDFTLEISRVEAEDVGVYYCMQSTH |
| | | | VPRTFGCGTKVEIK |
| 670 | FL_7-A8_CC-VH | artificial | QVTLKESGPTLVKPTETLTLTCTLSGFSLNNARMGVSWIRQPPGKCLEW |
| | | | LAHIFSNDEKSYSTSLKNRLTISKDSSKTQVVLTMTNVDPVDTATYYCA |
| | | | RIVGYGSGWYGFFDYWGQGTLVTVSS |
| 671 | FL_7-A8_CC-VL | artificial | DIQMTQSPSSLSASVGDRVTITCRASQGIRNDLGWYQQKPGKAPKRLIY |
| | | | AASTLQSGVPSRFSGSGSGTEFTLTISSLQPEDFATYYCLQHNSYPLTF |
| | | | GCGTKVEIK |
| 672 | FL_7-A8_CC_clipopt- | artificial | QVTLKESGPTLVKPTETLTLTCTLSGFSLNNARMGVSWIRQPPGKCLEW |
| | VH | | LAHIFSNDEKSYSTSLKNRLTISKDSSKTQVVLTMTNVDPVDTATYYCA |
| | | | RIVGYGSGWYGFFDYWGQGTLVTVSS |
| 673 | FL_7-A8_CC_clipopt- | artificial | EIQMTQSPSSLSASVGDRVTITCRASQGIRNDLGWYQQKPGKAPKRLIY |
| | VL | | AASTLQSGVPSRFSGSGSGTEFTLTISSLQPEDFATYYCLQHNSYPLTF |
| | | | GCGTKVEIK |
| 674 | MA_10-B5_CC-VH | artificial | EVQLVESGGGLVQPGGSLRLSCAASGFTFSNAWMSWVRQAPGKCLEWVG |
| | | | RIRSRSYGGTTDYAAPVKGRFTISRDDSKNTLFLQMNSLKTEDTAVYYC |
| | | | TTPSYSGSYYNYFSVMDVWGQGTTVTVSS |
| 675 | MA_10-B5_CC-VL | artificial | DIQMTQSPSSLSASVGDRVTITCRTSQSISSYLNWYQQKPGRAPKLLIF |
| | | | AASSLQGGVPSRFSGSGSGTDFTLTISSLQPEDFATYYCQQTYSMPFTF |
| | | | GCGTKVEIK |
| 676 | MA_10-B5_CC_clipopt- | artificial | EVQLVESGGGLVQPGGSLRLSCAASGFTFSNAWMSWVRQAPGKCLEWVG |
| | VH | | RIRSRSYGGTTDYAAPVKGRFTISRDDSKNTLFLQMNSLKTEDTAVYYC |
| | | | TTPSYSGSYYNYFSVMDVWGQGTTVTVSS |
| 677 | MA_10-B5_CC_clipopt- | artificial | EIQMTQSPSSLSASVGDRVTITCRTSQSISSYLNWYQQKPGRAPKLLIF |
| | VL | | AASSLQGGVPSRFSGSGSGTDFTLTISSLQPEDFATYYCQQTYSMPFTF |
| | | | GCGTKVEIK |
| 678 | MA_3-G10_CC-VH | artificial | EVQLLESGGGLVQPGGSLRLSCAASGFTFSSYAMSWVRQAPGKCLEWVS |
| | | | AISGSGGGTYYAASVKGRFTISRDNSKNTLYLQMSSLRAEDTAVYYCAT |
| | | | GKGVHLGFDYWGQGTLVTVSS |
| 679 | MA_3-G10_CC-VL | artificial | SYVLTQPPSVSVAPGQTARITCGGNNIGSKSVHWYQQKPGQAPVMVVYD |
| | | | DNDRPSGIPERFSGSNSGNTATLTISRVEAGDEADYYCQVWDYSGQRQV |
| | | | FGCGTKLTVL |
| 680 | MA_3-G10_CC_clipopt- | artificial | EVQLLESGGGLVQPGGSLRLSCAASGFTFSSYAMSWVRQAPGKCLEWVS |
| | VH | | AISGSGGGTYYAASVKGRFTISRDNSKNTLYLQMSSLRAEDTAVYYCAT |
| | | | GKGVHLGFDYWGQGTLVTVSS |
| 681 | MA_3-G10_CC_clipopt- | artificial | SYVLTQPPSVSVAPGQTARITCGGNNIGSKSVHWYQQKPGQAPVMVVYD |
| | VL | | DNDRPSGIPERFSGSNSGNTATLTISRVEAGDEADYYCQVWDYSGQRQV |
| | | | FGCGTKLTVL |
| 682 | MS_15-B12_CC-VH | artificial | QVQLQESGPGLVKPSETLSLTCTVSGGSISSSSYFWGWIRQPPGKCLEW |
| | | | IGNIYYSGSSNYNPSLKSRVTISVDTSKNQFSLKLSSVTAADTAVYYCA |
| | | | RLPRGDRDAFDIWGQGTMVTVSS |
| 683 | MS_15-B12_CC-VL | artificial | DIVMTQSPSSLSASVGDRVTITCRASQGISNYLAWYQQKPGKVPKLLIY |
| | | | AASTLQSGVPSRFSGSGSGTDFTLTISSLQPEDFATYYCQQSYSTPFTF |
| | | | GCGTKVEIK |
| 684 | MS_15- | artificial | QVQLQESGPGLVKPSETLSLTCTVSGGSISSSSYFWGWIRQPPGKCLEW |
| | B12_CC_clipopt-VH | | IGNIYYSGSSNYNPSLKSRVTISVDTSKNQFSLKLSSVTAADTAVYYCA |
| | | | RLPRGDRDAFDIWGQGTMVTVSS |
| 685 | MS_15- | artificial | DIVMTQSPSSLSASVGDRVTITCRASQGISNYLAWYQQKPGKVPKLLIY |
| | B12_CC_clipopt-VL | | AASTLQSGVPSRFSGSGSGTDFTLTISSLQPEDFATYYCQQSYSTPFTF |
| | | | GCGTKVEIK |
| 686 | MS_15- | artificial | QVQLQESGPGLVKPSETLSLTCTVSGGSISSSSYFWGWIRQPPGKCLEW |
| | B12_CC_clipopt_EI- | | IGNIYYSGSSNYNPSLKSRVTISVDTSKNQFSLKLSSVTAADTAVYYCA |
| | VH | | RLPRGDRDAFDIWGQGTMVTVSS |
| 687 | MS_15- | artificial | EIVMTQSPSSLSASVGDRVTITCRASQGISNYLAWYQQKPGKVPKLLIY |
| | B12_CC_clipopt_EI- | | AASTLQSGVPSRFSGSGSGTDFTLTISSLQPEDFATYYCQQSYSTPFTF |
| | VL | | GCGTKVEIK |
| 688 | MS_5-F11-VH | artificial | QVQLVESGGGLVKPGGSLRLSCAASGFTFSDYYMTWIRQAPGKGLEWLS |
| | | | YISSSGSTIYYADSVKGRFTISRDNAKNSLFLQMNSLRAEDTAVYYCAR |
| | | | DRNSHFDYWGQGTLVTVSS |
| 689 | MS_5-F11-VL | artificial | DIQMTQSPSSVSASVGDRVTITCRASQGINTWLAWYQQKPGKAPKLLIY |
| | | | GASGLQSGVPSRFSGSGSGTDFTLTISSLQPEDFATYYCQQAKSFPRTF |
| | | | GQGTKVEIK |
| 690 | MS_5-F11_clipopt- | artificial | QVQLVESGGGLVKPGGSLRLSCAASGFTFSDYYMTWIRQAPGKGLEWLS |
| | VH | | YISSSGSTIYYADSVKGRFTISRDNAKNSLFLQMNSLRAEDTAVYYCAR |
| | | | DRNSHFDYWGQGTLVTVSS |
| 691 | MS_5-F11_clipopt- | artificial | EIQMTQSPSSVSASVGDRVTITCRASQGINTWLAWYQQKPGKAPKLLIY |
| | VL | | GASGLQSGVPSRFSGSGSGTDFTLTISSLQPEDFATYYCQQAKSFPRTF |
| | | | GQGTKVEIK |
| 692 | MU_8-B7_CC-VH | artificial | QVQLQQWGAGLLKPSETLSLTCAVYGGSFSGYYWSWIRQPPGKCLEWIG |
| | | | DIDASGSTKYNPSLKSRVTISLDTSKNQFSLKLNSVTAADTAVYFCARK |
| | | | KYSTVWSYFDNWGQGTLVTVSS |
| 693 | MU_8-B7_CC-VL | artificial | SYELTQPSSVSVPPGQTASITCSGDKLGDKYASWYQQKPGQSPVLVIYQ |
| | | | DRKRPSGVPERFSGSNSGNTATLTISGTQAMDEADYYCQAWGSSTAVFG |
| | | | CGTKLTVL |
| 694 | MU_8-B7_CC_clipopt- | artificial | QVQLQQWGAGLLKPSETLSLTCAVYGGSFSGYYWSWIRQPPGKCLEWIG |
| | VH | | DIDASGSTKYNPSLKSRVTISLDTSKNQFSLKLNSVTAADTAVYFCARK |
| | | | KYSTVWSYFDNWGQGTLVTVSS |
| 695 | MU_8-B7_CC_clipopt- | artificial | SYELTQPSSVSVPPGQTASITCSGDKLGDKYASWYQQKPGQSPVLVIYQ |
| | VL | | DRKRPSGVPERFSGSNSGNTATLTISGTQAMDEADYYCQAWGSSTAVFG |
| | | | CGTKLTVL |
| 696 | PM_76-B10-VH | artificial | QVQLVESGGGLVKPGESLRLSCAASGFTFSDYYMYWVRQAPGKGLEWVA |
| | | | IISDGGYYTYYSDIIKGRFTISRDNAKNSLYLQMNSLKAEDTAVYYCAR |
| | | | GFPLLRHGAMDYWGQGTLVTVSS |
| 697 | PM_76-B10-VL | artificial | DIQMTQSPSSLSASVGDRVTITCKASQNVDTNVAWYQQKPGQAPKSLIY |
| | | | SASYRYSDVPSRFSGSASGTDFTLTISSVQSEDFATYYCQQYDSYPYTF |
| | | | GGGTKLEIK |
| 698 | PM_76-B10.11_CC- | artificial | QVQLVESGGGLVKPGESLRLSCAASGFTFSDYYMYWVRQAPGKCLEWVA |
| | VH | | IISDGGYYTYYSDIIKGRFTISRDNAKNSLYLQMNSLKAEDTAVYYCAR |
| | | | GFPLLRHGAMDYWGQGTLVTVSS |
| 699 | PM_76-B10.11_CC- | artificial | DIQMTQSPSSLSASVGDRVTITCKASQNVDTNVAWYQQKPGQAPKSLIY |
| | VL | | SASYVYWDVPSRFSGSASGTDFTLTISSVQSEDFATYYCQQYDQQLITF |
| | | | GCGTKLEIK |
| 700 | PM_76-B10.11_CC_GQ- | artificial | QVQLVESGGGLVKPGESLRLSCAASGFTFSDYYMYWVRQAPGKCLEWVA |
| | VH | | IISDGGYYTYYSDIIKGRFTISRDNAKNSLYLQMNSLKAEDTAVYYCAR |
| | | | GFPLLRHGAMDYWGQGTLVTVSS |
| 701 | PM_76-B10.11_CC_GQ- | artificial | DIQMTQSPSSLSASVGDRVTITCKASQNVDTNVAWYQQKPGQAPKSLIY |
| | VL | | SASYVYWDVPSRFSGSASGTDFTLTISSVQSEDFATYYCQQYDQQLITE |
| | | | GCGTKLEIK |
| 702 | PM_76- | artificial | QVQLVESGGGLVKPGESLRLSCAASGFTFSDYYMYWVRQAPGKCLEWVA |
| | B10.11_CC_clipopt- | | IISDGGYYTYYSDIIKGRFTISRDNAKNSLYLQMNSLKAEDTAVYYCAR |
| | VH | | GFPLLRHGAMDYWGQGTLVTVSS |
| 703 | PM_76- | artificial | EIQMTQSPSSLSASVGDRVTITCKASQNVDTNVAWYQQKPGQAPKSLIY |
| | B10.11_CC_clipopt- | | SASYVYWDVPSRFSGSASGTDFTLTISSVQSEDFATYYCQQYDQQLITF |
| | VL | | GCGTKLEIK |
| 704 | PM_76-B10_clipopt- | artificial | QVQLVESGGGLVKPGESLRLSCAASGFTFSDYYMYWVRQAPGKGLEWVA |
| | VH | | IISDGGYYTYYSDIIKGRFTISRDNAKNSLYLQMNSLKAEDTAVYYCAR |
| | | | GFPLLRHGAMDYWGQGTLVTVSS |
| 705 | PM_76-B10_clipopt- | artificial | EIQMTQSPSSLSASVGDRVTITCKASQNVDTNVAWYQQKPGQAPKSLIY |
| | VL | | SASYRYSDVPSRFSGSASGTDFTLTISSVQSEDFATYYCQQYDSYPYTF |
| | | | GGGTKLEIK |
| 706 | 4F10.03 | artificial | EVQLVESGGGLVQPGGSLKLSCAASGFTFNKYAMNWVRQAPGKGMEWVA |
| | | | RIRSKYNNYATYYADAVKDRFTISRDDSKNTLYLQMNNLKTEDTAVYYC |
| | | | VRAGNFGTSYISYWAYWGQGTLVTVSSGGGGSGGGGSGGGGSQTVVTQE |
| | | | PSLTVSPGGTVTITCGSSTGAVTSGNYPNWVQKKPGQAPRGLIGGTKFL |
| | | | APGTPARFSGSLSGGKAALTLSGVQPEDEAEYYCVLWYSNRWVFGSGTK |
| | | | LTVL |
| 707 | 4F10.03_CC | artificial | EVQLVESGGGLVQPGGSLKLSCAASGFTFNKYAMNWVRQAPGKGMEWVA |
| | | | RIRSKYNNYATYYADAVKDRFTISRDDSKNTLYLQMNNLKTEDTAVYYC |
| | | | VRAGNFGTSYISYWAYCGQGTLVTVSSGGGGSGGGGSGGGGSQTVVTQE |
| | | | PSLTVSPGGTVTITCGSSTGAVTSGNYPNWVQKKPGQCPRGLIGGTKFL |
| | | | APGTPARFSGSLSGGKAALTLSGVQPEDEAEYYCVLWYSNRWVFGSGTK |
| | | | LTVL |
| 708 | 4F10.03_GQ | artificial | EVQLVESGGGLVQPGGSLKLSCAASGFTFNKYAMNWVRQAPGKGMEWVA |
| | | | RIRSKYNNYATYYADAVKDRFTISRDDSKNTLYLQMNNLKTEDTAVYYC |
| | | | VRAGNFGTSYISYWAYWGQGTLVTVSSGGGGQGGGGQGGGGQQTVVTQE |
| | | | PSLTVSPGGTVTITCGSSTGAVTSGNYPNWVQKKPGQAPRGLIGGTKFL |
| | | | APGTPARFSGSLSGGKAALTLSGVQPEDEAEYYCVLWYSNRWVFGSGTK |
| | | | LTVL |
| 709 | 4F10.03_GQ_CC | artificial | EVQLVESGGGLVQPGGSLKLSCAASGFTFNKYAMNWVRQAPGKGMEWVA |
| | | | RIRSKYNNYATYYADAVKDRFTISRDDSKNTLYLQMNNLKTEDTAVYYC |
| | | | VRAGNFGTSYISYWAYCGQGTLVTVSSGGGGQGGGGQGGGGQQTVVTQE |
| | | | PSLTVSPGGTVTITCGSSTGAVTSGNYPNWVQKKPGQCPRGLIGGTKFL |
| | | | APGTPARFSGSLSGGKAALTLSGVQPEDEAEYYCVLWYSNRWVFGSGTK |
| | | | LTVL |
| 710 | 5C3.01 | artificial | EVQLVESGGGLVQPGGSLKLSCAASGFTFNKYAINWVRQAPGKGLEWVA |
| | | | RIRSKYNNYATYYADAVKDRFTISRDDSKNTVYLQMNNLKTEDTAVYYC |
| | | | ARAGNFGSSYISYWAYWGQGTLVTVSSGGGGSGGGGSGGGGSQTVVTQE |
| | | | PSLTVSPGGTVTITCGSSTGAVTSGNYPNWVQKKPGQAPRGLIGGTKFL |
| | | | APGTPARFSGSLSGGKAALTLSGVQPEDEAEYYCVLWYSNRWVFGSGTK |
| | | | LTVL |
| 711 | 5C3.01_CC | artificial | EVQLVESGGGLVQPGGSLKLSCAASGFTFNKYAINWVRQAPGKGLEWVA |
| | | | RIRSKYNNYATYYADAVKDRFTISRDDSKNTVYLQMNNLKTEDTAVYYC |
| | | | ARAGNFGSSYISYWAYCGQGTLVTVSSGGGGSGGGGSGGGGSQTVVTQE |
| | | | PSLTVSPGGTVTITCGSSTGAVTSGNYPNWVQKKPGQCPRGLIGGTKFL |
| | | | APGTPARFSGSLSGGKAALTLSGVQPEDEAEYYCVLWYSNRWVFGSGTK |
| | | | LTVL |
| 712 | 5C3.01_GQ | artificial | EVQLVESGGGLVQPGGSLKLSCAASGFTFNKYAINWVRQAPGKGLEWVA |
| | | | RIRSKYNNYATYYADAVKDRFTISRDDSKNTVYLQMNNLKTEDTAVYYC |
| | | | ARAGNFGSSYISYWAYWGQGTLVTVSSGGGGQGGGGQGGGGQQTVVTQE |
| | | | PSLTVSPGGTVTITCGSSTGAVTSGNYPNWVQKKPGQAPRGLIGGTKFL |
| | | | APGTPARFSGSLSGGKAALTLSGVQPEDEAEYYCVLWYSNRWVFGSGTK |
| | | | LTVL |
| 713 | 5C3.01_GQ_CC | artificial | EVQLVESGGGLVQPGGSLKLSCAASGFTFNKYAINWVRQAPGKGLEWVA |
| | | | RIRSKYNNYATYYADAVKDRFTISRDDSKNTVYLQMNNLKTEDTAVYYC |
| | | | ARAGNFGSSYISYWAYCGQGTLVTVSSGGGGQGGGGQGGGGQQTVVTQE |
| | | | PSLTVSPGGTVTITCGSSTGAVTSGNYPNWVQKKPGQCPRGLIGGTKFL |
| | | | APGTPARFSGSLSGGKAALTLSGVQPEDEAEYYCVLWYSNRWVFGSGTK |
| | | | LTVL |
| 714 | 5G6.05 | artificial | EVQLVESGGGLVQPGGSLKLSCAASGFTFNKYAMNWVRQAPGKGLEWVA |
| | | | RIRSKYNNYATYYAEAVKGRFTISRDDSKNTVYLQMNNLKTEDTAVYYC |
| | | | VRNENIGTSYISYWAYWGQGTLVTVSSGGGGSGGGGSGGGGSQTVVTQE |
| | | | PSLTVSPGGTVTITCGSSTGAVTSGNYPNWVQQKPGQAPRGLIGGTKFL |
| | | | APGTPARFSGSLSGGKAALTLSGVQPEDEAEYYCVLWYSNRWVFGSGTK |
| | | | LTVL |
| 715 | 5G6.05_CC | artificial | EVQLVESGGGLVQPGGSLKLSCAASGFTFNKYAMNWVRQAPGKGLEWVA |
| | | | RIRSKYNNYATYYAEAVKGRFTISRDDSKNTVYLQMNNLKTEDTAVYYC |
| | | | VRNENIGTSYISYWAYCGQGTLVTVSSGGGGSGGGGSGGGGSQTVVTQE |
| | | | PSLTVSPGGTVTITCGSSTGAVTSGNYPNWVQQKPGQCPRGLIGGTKFL |
| | | | APGTPARFSGSLSGGKAALTLSGVQPEDEAEYYCVLWYSNRWVFGSGTK |
| | | | LTVL |
| 716 | 5G6.05_GQ | artificial | EVQLVESGGGLVQPGGSLKLSCAASGFTFNKYAMNWVRQAPGKGLEWVA |
| | | | RIRSKYNNYATYYAEAVKGRFTISRDDSKNTVYLQMNNLKTEDTAVYYC |
| | | | VRNENIGTSYISYWAYWGQGTLVTVSSGGGGQGGGGQGGGGQQTVVTQE |
| | | | PSLTVSPGGTVTITCGSSTGAVTSGNYPNWVQQKPGQAPRGLIGGTKFL |
| | | | APGTPARFSGSLSGGKAALTLSGVQPEDEAEYYCVLWYSNRWVFGSGTK |
| | | | LTVL |
| 717 | 5G6.05_GQ_CC | artificial | EVQLVESGGGLVQPGGSLKLSCAASGFTENKYAMNWVRQAPGKGLEWVA |
| | | | RIRSKYNNYATYYAEAVKGRFTISRDDSKNTVYLQMNNLKTEDTAVYYC |
| | | | VRNENIGTSYISYWAYCGQGTLVTVSSGGGGQGGGGQGGGGQQTVVTQE |
| | | | PSLTVSPGGTVTITCGSSTGAVTSGNYPNWVQQKPGQCPRGLIGGTKFL |
| | | | APGTPARFSGSLSGGKAALTLSGVQPEDEAEYYCVLWYSNRWVFGSGTK |
| | | | LTVL |
| 718 | 6A8.02 | artificial | EVQLVESGGGLVQPGGSLKLSCAASGFTENKYAINWVREAPGKGLEWVA |
| | | | RIRSKYNNYATYYADAVKDRFTISRDDSKNTAYLQMNNLKTEDTAVYYC |
| | | | VRNANFGTSYISYFAYWGQGTLVTVSSGGGGSGGGGSGGGGSQTVVTQE |
| | | | PSLTVSPGGTVTLTCGSSTGAVTSGNYPNWVQKKPGQAPRGLIGGTKFL |
| | | | APGTPARFSGSLLGGKAALTLSGVQPEDEAEYYCVLWYSNRWVFGSGTK |
| | | | LTVL |
| 719 | 6A8.02_CC | artificial | EVQLVESGGGLVQPGGSLKLSCAASGFTENKYAINWVREAPGKGLEWVA |
| | | | RIRSKYNNYATYYADAVKDRFTISRDDSKNTAYLQMNNLKTEDTAVYYC |
| | | | VRNANFGTSYISYFAYCGQGTLVTVSSGGGGSGGGGSGGGGSQTVVTQE |
| | | | PSLTVSPGGTVTLTCGSSTGAVTSGNYPNWVQKKPGQCPRGLIGGTKFL |
| | | | APGTPARFSGSLLGGKAALTLSGVQPEDEAEYYCVLWYSNRWVFGSGTK |
| | | | LTVL |
| 720 | 6A8.02_GQ | artificial | EVQLVESGGGLVQPGGSLKLSCAASGFTENKYAINWVREAPGKGLEWVA |
| | | | RIRSKYNNYATYYADAVKDRFTISRDDSKNTAYLQMNNLKTEDTAVYYC |
| | | | VRNANFGTSYISYFAYWGQGTLVTVSSGGGGQGGGGQGGGGQQTVVTQE |
| | | | PSLTVSPGGTVTLTCGSSTGAVTSGNYPNWVQKKPGQAPRGLIGGTKFL |
| | | | APGTPARFSGSLLGGKAALTLSGVQPEDEAEYYCVLWYSNRWVFGSGTK |
| | | | LTVL |
| 721 | 6A8.02_GQ_CC | artificial | EVQLVESGGGLVQPGGSLKLSCAASGFTFNKYAINWVREAPGKGLEWVA |
| | | | RIRSKYNNYATYYADAVKDRFTISRDDSKNTAYLQMNNLKTEDTAVYYC |
| | | | VRNANFGTSYISYFAYCGQGTLVTVSSGGGGQGGGGQGGGGQQTVVTQE |
| | | | PSLTVSPGGTVTLTCGSSTGAVTSGNYPNWVQKKPGQCPRGLIGGTKFL |
| | | | APGTPARFSGSLLGGKAALTLSGVQPEDEAEYYCVLWYSNRWVFGSGTK |
| | | | LTVL |
| 722 | 6H10.09 | artificial | EVQLVESGGGLVQPGGSLKLSCAASGFTENKYAMNWVRQAPGKGMEWVA |
| | | | RIRSKYNNYATYYADAVKDRFTISRDDSKNTLYLQMNNLKTEDTAVYYC |
| | | | VRAGNFGSSYISYFAYWGQGTLVTVSSGGGGSGGGGSGGGGSQTVVTQE |
| | | | PSLTVSPGGTVTITCGSSTGAVTSGNYPNWIQKKPGQAPRGLIGGTKFL |
| | | | APGTPARFSGSLEGGKAALTLSGVQPEDEAEYYCVLYYSNRWVFGSGTK |
| | | | LTVL |
| 723 | 6H10.09_CC | artificial | EVQLVESGGGLVQPGGSLKLSCAASGFTFNKYAMNWVRQAPGKGMEWVA |
| | | | RIRSKYNNYATYYADAVKDRFTISRDDSKNTLYLQMNNLKTEDTAVYYC |
| | | | VRAGNFGSSYISYFAYCGQGTLVTVSSGGGGSGGGGSGGGGSQTVVTQE |
| | | | PSLTVSPGGTVTITCGSSTGAVTSGNYPNWIQKKPGQCPRGLIGGTKFL |
| | | | APGTPARFSGSLEGGKAALTLSGVQPEDEAEYYCVLYYSNRWVFGSGTK |
| | | | LTVL |
| 724 | 6H10.09_GQ | artificial | EVQLVESGGGLVQPGGSLKLSCAASGFTFNKYAMNWVRQAPGKGMEWVA |
| | | | RIRSKYNNYATYYADAVKDRFTISRDDSKNTLYLQMNNLKTEDTAVYYC |
| | | | VRHGNFGNSYISYWAYWGQGTLVTVSSGGGGSGGGGSGGGGSQTVVTQE |
| | | | PSLTVSPGGTVTITCGSSTGAVTSGNYPNWIQKKPGQAPRGLIGGTKFL |
| | | | APGTPARFSGSLEGGKAALTLSGVQPEDEAEYYCVLYYSNRWVFGSGTK |
| | | | LTVL |
| 725 | 6H10.09_GQ_CC | artificial | EVQLVESGGGLVQPGGSLKLSCAASGFTFNKYAMNWVRQAPGKGMEWVA |
| | | | RIRSKYNNYATYYADAVKDRFTISRDDSKNTLYLQMNNLKTEDTAVYYC |
| | | | VRAGNFGSSYISYFAYCGQGTLVTVSSGGGGQGGGGQGGGGQQTVVTQE |
| | | | PSLTVSPGGTVTITCGSSTGAVTSGNYPNWIQKKPGQCPRGLIGGTKFL |
| | | | APGTPARFSGSLEGGKAALTLSGVQPEDEAEYYCVLYYSNRWVFGSGTK |
| | | | LTVL |
| 726 | I2C | artificial | EVQLVESGGGLVQPGGSLKLSCAASGFTFNKYAMNWVRQAPGKGLEWVA |
| | | | RIRSKYNNYATYYADSVKDRFTISRDDSKNTAYLQMNNLKTEDTAVYYC |
| | | | VRHGNFGNSYISYWAYWGQGTLVTVSSGGGGSGGGGSGGGGSQTVVTQE |
| | | | PSLTVSPGGTVTLTCGSSTGAVTSGNYPNWVQQKPGQAPRGLIGGTKFL |
| | | | APGTPARFSGSLLGGKAALTLSGVQPEDEAEYYCVLWYSNRWVFGGGTK |
| | | | LTVL |
| 727 | I2C_CC | artificial | EVQLVESGGGLVQPGGSLKLSCAASGFTFNKYAMNWVRQAPGKGLEWVA |
| | | | RIRSKYNNYATYYADSVKDRFTISRDDSKNTAYLQMNNLKTEDTAVYYC |
| | | | VRHGNFGNSYISYWAYCGQGTLVTVSSGGGGSGGGGSGGGGSQTVVTQE |
| | | | PSLTVSPGGTVTLTCGSSTGAVTSGNYPNWVQQKPGQCPRGLIGGTKFL |
| | | | APGTPARFSGSLLGGKAALTLSGVQPEDEAEYYCVLWYSNRWVFGGGTK |
| | | | LTVL |
| 728 | I2C_GQ | artificial | EVQLVESGGGLVQPGGSLKLSCAASGFTFNKYAMNWVRQAPGKGLEWVA |
| | | | RIRSKYNNYATYYADSVKDRFTISRDDSKNTAYLQMNNLKTEDTAVYYC |
| | | | VRHGNFGNSYISYWAYWGQGTLVTVSSGGGGQGGGGQGGGGQQTVVTQE |
| | | | PSLTVSPGGTVTLTCGSSTGAVTSGNYPNWVQQKPGQAPRGLIGGTKFL |
| | | | APGTPARFSGSLLGGKAALTLSGVQPEDEAEYYCVLWYSNRWVFGGGTK |
| | | | LTVL |
| 729 | I2C_GQ_CC | artificial | EVQLVESGGGLVQPGGSLKLSCAASGFTFNKYAMNWVRQAPGKGLEWVA |
| | | | RIRSKYNNYATYYADSVKDRFTISRDDSKNTAYLQMNNLKTEDTAVYYC |
| | | | VRHGNFGNSYISYWAYCGQGTLVTVSSGGGGQGGGGQGGGGQQTVVTQE |
| | | | PSLTVSPGGTVTLTCGSSTGAVTSGNYPNWVQQKPGQCPRGLIGGTKFL |
| | | | APGTPARFSGSLLGGKAALTLSGVQPEDEAEYYCVLWYSNRWVFGGGTK |
| | | | LTVL |
| 730 | BC_A7_27-C4-G7 | artificial | QVQLVQSGAEVKKPGASVKVSCKASGYTFTNHIIHWVRQAPGQGLEWMG |
| | | | YINPYPGYHAYNEKFQGRATMTSDTSTSTVYMELSSLRSEDTAVYYCAR |
| | | | DGYYRDTDVLDYWGQGTLVTVSSGGGGSGGGGSGGGGSDIQMTQSPSSL |
| | | | SASVGDRVTITCQASQDISNYLNWYQQKPGKAPKLLIYYTSRLHTGVPS |
| | | | RFSGSGSGTDFTFTISSLEPEDIATYYCQQGNTLPWTFGQGTKVEIK |
| 731 | BC_A7_27-C4-G7_CC | artificial | QVQLVQSGAEVKKPGASVKVSCKASGYTFTNHIIHWVRQAPGQCLEWMG |
| | | | YINPYPGYHAYNEKFQGRATMTSDTSTSTVYMELSSLRSEDTAVYYCAR |
| | | | DGYYRDTDVLDYWGQGTLVTVSSGGGGSGGGGSGGGGSDIQMTQSPSSL |
| | | | SASVGDRVTITCQASQDISNYLNWYQQKPGKAPKLLIYYTSRLHTGVPS |
| | | | RFSGSGSGTDFTFTISSLEPEDIATYYCQQGNTLPWTFGCGTKVEIK |
| 732 | BC_A7_27-C4- | artificial | QVQLVQSGAEVKKPGASVKVSCKASGYTFTNHIIHWVRQAPGQCLEWMG |
| | G7_CC_clipopt | | YINPYPGYHAYNEKFQGRATMTSDTSTSTVYMELSSLRSEDTAVYYCAR |
| | | | DGYYRDTDVLDYWGQGTLVTVSSGGGGQGGGGQGGGGQEIQMTQSPSSL |
| | | | SASVGDRVTITCQASQDISNYLNWYQQKPGKAPKLLIYYTSRLHTGVPS |
| | | | RFSGSGSGTDFTFTISSLEPEDIATYYCQQGNTLPWTFGCGTKVEIK |
| 733 | BC_A7_27-C4- | artificial | QVQLVQSGAEVKKPGASVKVSCKASGYTFTNHIIHWVRQAPGQGLEWMG |
| | G7_clipopt | | YINPYPGYHAYNEKFQGRATMTSDTSTSTVYMELSSLRSEDTAVYYCAR |
| | | | DGYYRDTDVLDYWGQGTLVTVSSGGGGQGGGGQGGGGQEIQMTQSPSSL |
| | | | SASVGDRVTITCQASQDISNYLNWYQQKPGKAPKLLIYYTSRLHTGVPS |
| | | | RFSGSGSGTDFTFTISSLEPEDIATYYCQQGNTLPWTFGQGTKVEIK |
| 734 | CD123_24-B4-f_NK_CC | artificial | EVQLLESGGGLVQPGGSLRLSCAASGFTFSHYAMSWVRQAPGKCLEWVS |
| | | | AVSGGGDKTLYADAVKGRFTISRDNSKNTLFLQMNSLRAEDTAIYYCAR |
| | | | LRGFYYGMDVWGQGTTVTVSSGGGGSGGGGSGGGGSDIVLTQSPLSLPV |
| | | | TPGEPASISCRSSQSLLHSNKYNYLDWYLQKPGQSPQLLIYLGSNRASG |
| | | | VPDRFSGSGSGTDFTLKISRVEAEDVGVYYCMQALQTPPITFGCGTRLE |
| | | | IK |
| 735 | CD123_24-B4- | artificial | EVQLLESGGGLVQPGGSLRLSCAASGFTFSHYAMSWVRQAPGKCLEWVS |
| | f_NK_CC_clipopt | | AVSGGGDKTLYADAVKGRFTISRDNSKNTLFLQMNSLRAEDTAIYYCAR |
| | | | LRGFYYGMDVWGQGTTVTVSSGGGGQGGGGQGGGGQEIVLTQSPLSLPV |
| | | | TPGEPASISCRSSQSLLHSNKYNYLDWYLQKPGQSPQLLIYLGSNRASG |
| | | | VPDRFSGSGSGTDFTLKISRVEAEDVGVYYCMQALQTPPITFGCGTRLE |
| | | | IK |
| 736 | CD19_97-G1RE- | artificial | DIVMTQSPLSLPVISGEPASISCRSSQSLLHKNAFNYLDWYLQKPGQSP |
| | C2_LH_CC | | QLLIYLGSNRASGVPDRFSGSGSGTDFTLKISRVEAEDVGVYYCMQALQ |
| | | | TPFTFGCGTKVDIKGGGGSGGGGSGGGGSQVQLVESGGGVVQPGRSLRL |
| | | | SCAASGFTFSSYGMHWVRQAPGKCLEWVAVISYEGSNKYYAESVKGRFT |
| | | | ISRDNSKNTLYLQMNSLRDEDTAVYYCARDRGTIFGNYGLEVWGQGTTV |
| | | | TVSS |
| 737 | CD19_97-G1RE- | artificial | DIVMTQSPLSLPVISGEPASISCRSSQSLLHKNAFNYLDWYLQKPGQSP |
| | C2_LH_CC_clipopt | | QLLIYLGSNRASGVPDRFSGSGSGTDFTLKISRVEAEDVGVYYCMQALQ |
| | | | TPFTFGCGTKVDIKGGGGQGGGGQGGGGQQVQLVESGGGVVQPGRSLRL |
| | | | SCAASGFTFSSYGMHWVRQAPGKCLEWVAVISYEGSNKYYAESVKGRFT |
| | | | ISRDNSKNTLYLQMNSLRDEDTAVYYCARDRGTIFGNYGLEVWGQGTTV |
| | | | TVSS |
| 738 | CD33_E11 | artificial | QVQLVQSGAEVKKPGESVKVSCKASGYTFTNYGMNWVKQAPGQGLEWMG |
| | | | WINTYTGEPTYADKFQGRVTMTTDTSTSTAYMEIRNLGGDDTAVYYCAR |
| | | | WSWSDGYYVYFDYWGQGTSVTVSSGGGGSGGGGSGGGGSDIVMTQSPDS |
| | | | LTVSLGERTTINCKSSQSVLDSSTNKNSLAWYQQKPGQPPKLLLSWAST |
| | | | RESGIPDRFSGSGSGTDFTLTIDSPQPEDSATYYCQQSAHFPITFGQGT |
| | | | RLEIK |
| 739 | CD33_E11_CC | artificial | QVQLVQSGAEVKKPGESVKVSCKASGYTFTNYGMNWVKQAPGQCLEWMG |
| | | | WINTYTGEPTYADKFQGRVTMTTDTSTSTAYMEIRNLGGDDTAVYYCAR |
| | | | WSWSDGYYVYFDYWGQGTSVTVSSGGGGSGGGGSGGGGSDIVMTQSPDS |
| | | | LTVSLGERTTINCKSSQSVLDSSTNKNSLAWYQQKPGQPPKLLLSWAST |
| | | | RESGIPDRFSGSGSGTDFTLTIDSPQPEDSATYYCQQSAHFPITFGCGT |
| | | | RLEIK |
| 740 | CD33_E11_CC_GQ | artificial | QVQLVQSGAEVKKPGESVKVSCKASGYTFTNYGMNWVKQAPGQCLEWMG |
| | | | WINTYTGEPTYADKFQGRVTMTTDTSTSTAYMEIRNLGGDDTAVYYCAR |
| | | | WSWSDGYYVYFDYWGQGTSVTVSSGGGGQGGGGQGGGGQDIVMTQSPDS |
| | | | LTVSLGERTTINCKSSQSVLDSSTNKNSLAWYQQKPGQPPKLLLSWAST |
| | | | RESGIPDRFSGSGSGTDFTLTIDSPQPEDSATYYCQQSAHFPITFGCGT |
| | | | RLEIK |
| 741 | CD33_E11_CC_GR | artificial | QVQLVQSGAEVKKPGESVKVSCKASGYTFTNYGMNWVKQAPGQCLEWMG |
| | | | WINTYTGEPTYADKFQGRVTMTTDTSTSTAYMEIRNLGGDDTAVYYCAR |
| | | | WSWSDGYYVYFDYWGQGTSVTVSSGGGGRGGGGRGGGGRDIVMTQSPDS |
| | | | LTVSLGERTTINCKSSQSVLDSSTNKNSLAWYQQKPGQPPKLLLSWAST |
| | | | RESGIPDRFSGSGSGTDFTLTIDSPQPEDSATYYCQQSAHFPITFGCGT |
| | | | RLEIK |
| 742 | CD33_E11_CC_clipopt | artificial | QVQLVQSGAEVKKPGESVKVSCKASGYTFTNYGMNWVKQAPGQCLEWMG |
| | | | WINTYTGEPTYADKFQGRVTMTTDTSTSTAYMEIRNLGGDDTAVYYCAR |
| | | | WSWSDGYYVYFDYWGQGTSVTVSSGGGGQGGGGQGGGGQEIVMTQSPDS |
| | | | LTVSLGERTTINCKSSQSVLDSSTNKNSLAWYQQKPGQPPKLLLSWAST |
| | | | RESGIPDRFSGSGSGTDFTLTIDSPQPEDSATYYCQQSAHFPITFGCGT |
| | | | RLEIK |
| 743 | CD33_E11 clipopt | artificial | QVQLVQSGAEVKKPGESVKVSCKASGYTFTNYGMNWVKQAPGQGLEWMG |
| | | | WINTYTGEPTYADKFQGRVTMTTDTSTSTAYMEIRNLGGDDTAVYYCAR |
| | | | WSWSDGYYVYFDYWGQGTSVTVSSGGGGQGGGGQGGGGQEIVMTQSPDS |
| | | | LTVSLGERTTINCKSSQSVLDSSTNKNSLAWYQQKPGQPPKLLLSWAST |
| | | | RESGIPDRFSGSGSGTDFTLTIDSPQPEDSATYYCQQSAHFPITFGQGT |
| | | | RLEIK |
| 744 | CD70_1_C7D_CC | artificial | EVQLLESGGGMVQPGGSLRLSCAASGFTFSTYAMSWVRQAPGKCLEWVS |
| | | | AISGSGGRTFYAESVEGRFTISRDNSKNTLYLQMNSLRAEDTAVYYCAK |
| | | | HDYSNYPYFDYWGQGTLVTVSSGGGGSGGGGSGGGGSEIVLTQSPGTLS |
| | | | LSPGERATLSCRASQSVRSTYLAWYQQKPGQAPRLLIYGASSRATGIPD |
| | | | RFSGSGSGTDFTLTISRLEPEDFAVYSCQQYGDLPFTFGCGTKLEIK |
| 745 | CD70_1_C7D_CC_ | artificial | EVQLLESGGGMVQPGGSLRLSCAASGFTFSTYAMSWVRQAPGKCLEWVS |
| | clipopt | | AISGSGGRTFYAESVEGRFTISRDNSKNTLYLQMNSLRAEDTAVYYCAK |
| | | | HDYSNYPYFDYWGQGTLVTVSSGGGGQGGGGQGGGGQEIVLTQSPGTLS |
| | | | LSPGERATLSCRASQSVRSTYLAWYQQKPGQAPRLLIYGASSRATGIPD |
| | | | RFSGSGSGTDFTLTISRLEPEDFAVYSCQQYGDLPFTFGCGTKLEIK |
| 746 | CH19_2G6.007_CC | artificial | QVQLVESGGGVVQPGGSLRLSCAASGFTFSSYGMHWVRQAPGKCLEWVA |
| | | | FIWYEGSNKYYAESVKDRFTISRDNSKNTLYLQMNSLRAEDTAVYYCAR |
| | | | RAGIIGTIGYYYGMDVWGQGTTVTVSSGGGGSGGGGSGGGGSSYELTQP |
| | | | PSVSVSPGQTASITCSGDRLGEKYTSWYQQRPGQSPLLVIYQDTKRPSG |
| | | | IPERFSGSNSGNTATLTISGTQAMDEADYYCQAWESSTVVFGCGTKLTV |
| | | | L |
| 747 | CH19_2G6.007_CC_ | artificial | QVQLVESGGGVVQPGGSLRLSCAASGFTFSSYGMHWVRQAPGKCLEWVA |
| | clipopt | | FIWYEGSNKYYAESVKDRFTISRDNSKNTLYLQMNSLRAEDTAVYYCAR |
| | | | RAGIIGTIGYYYGMDVWGQGTTVTVSSGGGGQGGGGQGGGGQSYELTQP |
| | | | PSVSVSPGQTASITCSGDRLGEKYTSWYQQRPGQSPLLVIYQDTKRPSG |
| | | | IPERFSGSNSGNTATLTISGTQAMDEADYYCQAWESSTVVFGCGTKLTV |
| | | | L |
| 748 | CH3_15-E11_CC | artificial | QVQLVQSGAEVKKPGASVKVSCKASGYTFTNYWMNWVRQAPGQCLEWMG |
| | | | NIAYGVKGTNYNQKFQGRVTMTVDTSSSTAYMELSRLRSDDTAVYYCAT |
| | | | RYFYVMDYWGQGTLVTVSSGGGGSGGGGSGGGGSDIQMTQSPSSLSASV |
| | | | GDRVTITCRASQDISNYLNWYQQKPGKVPKLLIYYTSRLHSGVPSRFSG |
| | | | SGSGTDFTLTISSLQPEDVATYYCVQYAQFPLTFGCGTKVEIK |
| 749 | CH3_15- | artificial | QVQLVQSGAEVKKPGASVKVSCKASGYTFTNYWMNWVRQAPGQCLEWMG |
| | E11_CC_clipopt | | NIAYGVKGTNYNQKFQGRVTMTVDTSSSTAYMELSRLRSDDTAVYYCAT |
| | | | RYFYVMDYWGQGTLVTVSSGGGGQGGGGQGGGGQDIQMTQSPSSLSASV |
| | | | GDRVTITCRASQDISNYLNWYQQKPGKVPKLLIYYTSRLHSGVPSRFSG |
| | | | SGSGTDFTLTISSLQPEDVATYYCVQYAQFPLTFGCGTKVEIK |
| 750 | CH3_15- | artificial | QVQLVQSGAEVKKPGASVKVSCKASGYTFTNYWMNWVRQAPGQCLEWMG |
| | E11_CC_clipopt_EI | | NIAYGVKGTNYNQKFQGRVTMTVDTSSSTAYMELSRLRSDDTAVYYCAT |
| | | | RYFYVMDYWGQGTLVTVSSGGGGQGGGGQGGGGQEIQMTQSPSSLSASV |
| | | | GDRVTITCRASQDISNYLNWYQQKPGKVPKLLIYYTSRLHSGVPSRFSG |
| | | | SGSGTDFTLTISSLQPEDVATYYCVQYAQFPLTFGCGTKVEIK |
| 751 | CH3_G8A_6-B12 | artificial | EVQLLESGGGLVQPGGSLRLSCAASGFSFSSYPINWVRQAPGKGLEWVG |
| | | | VIWTGGGTNYASSVKGRFTISRDNSKNTVYLQMNSLRAEDTAVYYCAKS |
| | | | RGVYDFDGRGAMDYWGQGTLVTVSSGGGGSGGGGSGGGGSDIVMTQSPD |
| | | | SLAVSLGERATINCKSSQSLLYSSNQKNYFAWYQQKPGQPPKLLIYWAS |
| | | | TRESGVPDRFSGSGSGTDFTLTISSLQAEDVAVYYCQQYYSYPYTFGQG |
| | | | TKLEIK |
| 752 | CH3_G8A_6- | artificial | EVQLLESGGGLVQPGGSLRLSCAASGFSFSSYPINWVRQAPGKGLEWVG |
| | B12_clipopt | | VIWTGGGTNYASSVKGRFTISRDNSKNTVYLQMNSLRAEDTAVYYCAKS |
| | | | RGVYDFDGRGAMDYWGQGTLVTVSSGGGGQGGGGQGGGGQEIVMTQSPD |
| | | | SLAVSLGERATINCKSSQSLLYSSNQKNYFAWYQQKPGQPPKLLIYWAS |
| | | | TRESGVPDRFSGSGSGTDFTLTISSLQAEDVAVYYCQQYYSYPYTFGQG |
| | | | TKLEIK |
| 753 | CL_10D8_CC | artificial | QVQLVQSGAEVKKPGASVKVSCKASGYTFTGYYMHWVRQAPGQCLEWMG |
| | | | WINPNSGGTKYAQKFQGRVTMTRDTSISTAYMELSRLRSDDTAVYYCAR |
| | | | DRITVAGTYYYYGMDVWGQGTTVTVSSGGGGSGGGGSGGGGSDIQMTQS |
| | | | PSSVSASVGDRVTITCRASQGVNNWLAWYQQKPGKAPKLLIYTASSLQS |
| | | | GVPSRFSGSGSGTDFTLTIRSLQPEDFATYYCQQANSFPITFGCGTRLE |
| | | | IK |
| 754 | CL_10D8_CC_clipopt | artificial | QVQLVQSGAEVKKPGASVKVSCKASGYTFTGYYMHWVRQAPGQCLEWMG |
| | | | WINPNSGGTKYAQKFQGRVTMTRDTSISTAYMELSRLRSDDTAVYYCAR |
| | | | DRITVAGTYYYYGMDVWGQGTTVTVSSGGGGQGGGGQGGGGQEIQMTQS |
| | | | PSSVSASVGDRVTITCRASQGVNNWLAWYQQKPGKAPKLLIYTASSLQS |
| | | | GVPSRFSGSGSGTDFTLTIRSLQPEDFATYYCQQANSFPITFGCGTRLE |
| | | | IK |
| 755 | CL1_7-D7_CC | artificial | QVQLVQSGAEVKKPGASVKVSCKASGYTFTNYYMHWVRQAPGQCLEWMG |
| | | | WINPTSGGANYAQKFQGRVTMTRDTSISTAYMELSRLRSDDTAVYFCAR |
| | | | ESHAIQEGIWFDYWGQGTLVTVSSGGGGSGGGGSGGGGSDIQMTQSPSS |
| | | | LSASVGDRVTISCRASQSISNYLNWYQQKPGKAPKLLIYDASSLQSGVP |
| | | | SRFSGSGSGTDFTLTISSLQPEDFATYYCQQSYSFPLTFGCGTKVEIK |
| 756 | CL1_7-D7_CC_clipopt | artificial | QVQLVQSGAEVKKPGASVKVSCKASGYTFTNYYMHWVRQAPGQCLEWMG |
| | | | WINPTSGGANYAQKFQGRVTMTRDTSISTAYMELSRLRSDDTAVYFCAR |
| | | | ESHAIQEGIWFDYWGQGTLVTVSSGGGGQGGGGQGGGGQEIQMTQSPSS |
| | | | LSASVGDRVTISCRASQSISNYLNWYQQKPGKAPKLLIYDASSLQSGVP |
| | | | SRFSGSGSGTDFTLTISSLQPEDFATYYCQQSYSFPLTFGCGTKVEIK |
| 757 | CL6_3D4-01.G2_LH | artificial | EIVLTQSPGTLSLSPGERATLSCRASQSVSSSYLAWYQQKPGQAPRLLI |
| | | | YGASSRATGIPDRFSGSGSGTDFTLTISRLEPEDFAVYYCQQYGSSPLT |
| | | | FGCGTKLEIKGGGGSGGGGSGGGGSQVQLVQSGAEVKKPGASVKVSCKA |
| | | | SGYTFTGYYMHWVRQAPGQCLEWMGWINPNSGETNYAQKFQGRVTMTRD |
| | | | TSISTAYMELSRLRSDDTAVYYCARDALIVVAPVTRDYYYYGMDVWGQG |
| | | | TTVTVSS |
| 758 | CL6_3D4- | artificial | EIVLTQSPGTLSLSPGERATLSCRASQSVSSSYLAWYQQKPGQAPRLLI |
| | 01.G2_LH_clipopt | | YGASSRATGIPDRFSGSGSGTDFTLTISRLEPEDFAVYYCQQYGSSPLT |
| | | | FGCGTKLEIKGGGGQGGGGQGGGGQQVQLVQSGAEVKKPGASVKVSCKA |
| | | | SGYTFTGYYMHWVRQAPGQCLEWMGWINPNSGETNYAQKFQGRVTMTRD |
| | | | TSISTAYMELSRLRSDDTAVYYCARDALIVVAPVTRDYYYYGMDVWGQG |
| | | | TTVTVSS |
| 759 | CS1_PDL241.12_LH_CC_ | artificial | DIQMTQSPSSLSASVGDRVTITCKASQDVSTAVAWYQQKPGKAPKLLIY |
| | +R | | SASYRYTGVPDRFTGSGSGTDFTLTISSLQPEDFATYYCQQHYSTPPYT |
| | | | FGCGTKVEIKRGGGGSGGGGSGGGGSQVQLVQSGAEVKKPGASVKVSCK |
| | | | ASGYAFSSSWMNWVRQAPGQCLEWIGRIYPGDADAKYNAKFKGKATLTA |
| | | | DKSTSTAYMELSSLRSEDTAVYYCARSTMIATGAMDYWGQGTLVTVSS |
| 760 | CS1_PDL241.12_LH_CC_ | artificial | DIQMTQSPSSLSASVGDRVTITCKASQDVSTAVAWYQQKPGKAPKLLIY |
| | −R | | SASYRYTGVPDRFTGSGSGTDFTLTISSLQPEDFATYYCQQHYSTPPYT |
| | | | FGCGTKVEIKGGGGSGGGGSGGGGSQVQLVQSGAEVKKPGASVKVSCKA |
| | | | SGYAFSSSWMNWVRQAPGQCLEWIGRIYPGDADAKYNAKFKGKATLTAD |
| | | | KSTSTAYMELSSLRSEDTAVYYCARSTMIATGAMDYWGQGTLVTVSS |
| 761 | CS1_PDL241.12_LH_CC_ | artificial | DIQMTQSPSSLSASVGDRVTITCKASQDVSTAVAWYQQKPGKAPKLLIY |
| | −R_clipopt | | SASYRYTGVPDRFTGSGSGTDFTLTISSLQPEDFATYYCQQHYSTPPYT |
| | | | FGCGTKVEIKGGGGQGGGGQGGGGQQVQLVQSGAEVKKPGASVKVSCKA |
| | | | SGYAFSSSWMNWVRQAPGQCLEWIGRIYPGDADAKYNAKFKGKATLTAD |
| | | | KSTSTAYMELSSLRSEDTAVYYCARSTMIATGAMDYWGQGTLVTVSS |
| 762 | DL_8-A7_CC | artificial | QVQLQESGPGLVKPSETLSLTCTVSGGSISSYYWSWIRQPPGKCLEWIG |
| | | | YVYYSGTTNYNPSLKSRVTISVDTSKNQFSLKLSSVTAADTAVYYCASI |
| | | | AVTGFYFDYWGQGTLVTVSSGGGGSGGGGSGGGGSEIVLTQSPGTLSLS |
| | | | PGERVTLSCRASQRVNNNYLAWYQQRPGQAPRLLIYGASSRATGIPDRE |
| | | | SGSGSGTDFTLTISRLEPEDFAVYYCQQYDRSPLTFGCGTKLEIK |
| 763 | DL_8-A7_CC_clipopt | artificial | QVQLQESGPGLVKPSETLSLTCTVSGGSISSYYWSWIRQPPGKCLEWIG |
| | | | YVYYSGTTNYNPSLKSRVTISVDTSKNQFSLKLSSVTAADTAVYYCASI |
| | | | AVTGFYFDYWGQGTLVTVSSGGGGQGGGGQGGGGQEIVLTQSPGTLSLS |
| | | | PGERVTLSCRASQRVNNNYLAWYQQRPGQAPRLLIYGASSRATGIPDRF |
| | | | SGSGSGTDFTLTISRLEPEDFAVYYCQQYDRSPLTFGCGTKLEIK |
| 764 | EGFRvIII_CC | artificial | QVQLVESGGGVVQSGRSLRLSCAASGFTFRNYGMHWVRQAPGKCLEWVA |
| | | | VIWYDGSDKYYADSVRGRFTISRDNSKNTLYLQMNSLRAEDTAVYYCAR |
| | | | DGYDILTGNPRDFDYWGQGTLVTVSSGGGGSGGGGSGGGGSDTVMTQTP |
| | | | LSSHVTLGQPASISCRSSQSLVHSDGNTYLSWLQQRPGQPPRLLIYRIS |
| | | | RRFSGVPDRFSGSGAGTDFTLEISRVEAEDVGVYYCMQSTHVPRTFGCG |
| | | | TKVEIK |
| 765 | EGFRVIII_CC_clipopt | artificial | QVQLVESGGGVVQSGRSLRLSCAASGFTFRNYGMHWVRQAPGKCLEWVA |
| | | | VIWYDGSDKYYADSVRGRFTISRDNSKNTLYLQMNSLRAEDTAVYYCAR |
| | | | DGYDILTGNPRDFDYWGQGTLVTVSSGGGGQGGGGQGGGGQDTVMTQTP |
| | | | LSSHVTLGQPASISCRSSQSLVHSDGNTYLSWLQQRPGQPPRLLIYRIS |
| | | | RRFSGVPDRFSGSGAGTDFTLEISRVEAEDVGVYYCMQSTHVPRTFGCG |
| | | | TKVEIK |
| 766 | FL_7-A8_CC | artificial | QVTLKESGPTLVKPTETLTLTCTLSGFSLNNARMGVSWIRQPPGKCLEW |
| | | | LAHIFSNDEKSYSTSLKNRLTISKDSSKTQVVLTMTNVDPVDTATYYCA |
| | | | RIVGYGSGWYGFFDYWGQGTLVTVSSGGGGSGGGGSGGGGSDIQMTQSP |
| | | | SSLSASVGDRVTITCRASQGIRNDLGWYQQKPGKAPKRLIYAASTLQSG |
| | | | VPSRFSGSGSGTEFTLTISSLQPEDFATYYCLQHNSYPLTFGCGTKVEI |
| | | | K |
| 767 | FL_7-A8_CC_clipopt | artificial | QVTLKESGPTLVKPTETLTLTCTLSGFSLNNARMGVSWIRQPPGKCLEW |
| | | | LAHIFSNDEKSYSTSLKNRLTISKDSSKTQVVLTMTNVDPVDTATYYCA |
| | | | RIVGYGSGWYGFFDYWGQGTLVTVSSGGGGQGGGGQGGGGQEIQMTQSP |
| | | | SSLSASVGDRVTITCRASQGIRNDLGWYQQKPGKAPKRLIYAASTLQSG |
| | | | VPSRFSGSGSGTEFTLTISSLQPEDFATYYCLQHNSYPLTFGCGTKVEI |
| | | | K |
| 768 | MA_10-B5_CC | artificial | EVQLVESGGGLVQPGGSLRLSCAASGFTFSNAWMSWVRQAPGKCLEWVG |
| | | | RIRSRSYGGTTDYAAPVKGRFTISRDDSKNTLFLQMNSLKTEDTAVYYC |
| | | | TTPSYSGSYYNYFSVMDVWGQGTTVTVSSGGGGSGGGGSGGGGSDIQMT |
| | | | QSPSSLSASVGDRVTITCRTSQSISSYLNWYQQKPGRAPKLLIFAASSL |
| | | | QGGVPSRFSGSGSGTDFTLTISSLQPEDFATYYCQQTYSMPFTFGCGTK |
| | | | VEIK |
| 769 | MA_10-B5_CC_clipopt | artificial | EVQLVESGGGLVQPGGSLRLSCAASGFTFSNAWMSWVRQAPGKCLEWVG |
| | | | RIRSRSYGGTTDYAAPVKGRFTISRDDSKNTLFLQMNSLKTEDTAVYYC |
| | | | TTPSYSGSYYNYFSVMDVWGQGTTVTVSSGGGGQGGGGQGGGGQEIQMT |
| | | | QSPSSLSASVGDRVTITCRTSQSISSYLNWYQQKPGRAPKLLIFAASSL |
| | | | QGGVPSRFSGSGSGTDFTLTISSLQPEDFATYYCQQTYSMPFTFGCGTK |
| | | | VEIK |
| 770 | MA_3-G10_CC | artificial | EVQLLESGGGLVQPGGSLRLSCAASGFTFSSYAMSWVRQAPGKCLEWVS |
| | | | AISGSGGGTYYAASVKGRFTISRDNSKNTLYLQMSSLRAEDTAVYYCAT |
| | | | GKGVHLGFDYWGQGTLVTVSSGGGGSGGGGSGGGGSSYVLTQPPSVSVA |
| | | | PGQTARITCGGNNIGSKSVHWYQQKPGQAPVMVVYDDNDRPSGIPERFS |
| | | | GSNSGNTATLTISRVEAGDEADYYCQVWDYSGQRQVFGCGTKLTVL |
| 771 | MA_3-G10_CC_clipopt | artificial | EVQLLESGGGLVQPGGSLRLSCAASGFTFSSYAMSWVRQAPGKCLEWVS |
| | | | AISGSGGGTYYAASVKGRFTISRDNSKNTLYLQMSSLRAEDTAVYYCAT |
| | | | GKGVHLGFDYWGQGTLVTVSSGGGGQGGGGQGGGGQSYVLTQPPSVSVA |
| | | | PGQTARITCGGNNIGSKSVHWYQQKPGQAPVMVVYDDNDRPSGIPERFS |
| | | | GSNSGNTATLTISRVEAGDEADYYCQVWDYSGQRQVFGCGTKLTVL |
| 772 | MS_15-B12_CC | artificial | QVQLQESGPGLVKPSETLSLTCTVSGGSISSSSYFWGWIRQPPGKCLEW |
| | | | IGNIYYSGSSNYNPSLKSRVTISVDTSKNQFSLKLSSVTAADTAVYYCA |
| | | | RLPRGDRDAFDIWGQGTMVTVSSGGGGSGGGGSGGGGSDIVMTQSPSSL |
| | | | SASVGDRVTITCRASQGISNYLAWYQQKPGKVPKLLIYAASTLQSGVPS |
| | | | RFSGSGSGTDFTLTISSLQPEDFATYYCQQSYSTPFTFGCGTKVEIK |
| 773 | MS_15- | artificial | QVQLQESGPGLVKPSETLSLTCTVSGGSISSSSYFWGWIRQPPGKCLEW |
| | B12_CC_clipopt | | IGNIYYSGSSNYNPSLKSRVTISVDTSKNQFSLKLSSVTAADTAVYYCA |
| | | | RLPRGDRDAFDIWGQGTMVTVSSGGGGQGGGGQGGGGQDIVMTQSPSSL |
| | | | SASVGDRVTITCRASQGISNYLAWYQQKPGKVPKLLIYAASTLQSGVPS |
| | | | RFSGSGSGTDFTLTISSLQPEDFATYYCQQSYSTPFTFGCGTKVEIK |
| 774 | MS_15- | artificial | QVQLQESGPGLVKPSETLSLTCTVSGGSISSSSYFWGWIRQPPGKCLEW |
| | B12_CC_clipopt_EI | | IGNIYYSGSSNYNPSLKSRVTISVDTSKNQFSLKLSSVTAADTAVYYCA |
| | | | RLPRGDRDAFDIWGQGTMVTVSSGGGGQGGGGQGGGGQEIVMTQSPSSL |
| | | | SASVGDRVTITCRASQGISNYLAWYQQKPGKVPKLLIYAASTLQSGVPS |
| | | | RFSGSGSGTDFTLTISSLQPEDFATYYCQQSYSTPFTFGCGTKVEIK |
| 775 | MS_5-F11 | artificial | QVQLVESGGGLVKPGGSLRLSCAASGFTFSDYYMTWIRQAPGKGLEWLS |
| | | | YISSSGSTIYYADSVKGRFTISRDNAKNSLFLQMNSLRAEDTAVYYCAR |
| | | | DRNSHFDYWGQGTLVTVSSGGGGSGGGGSGGGGSDIQMTQSPSSVSASV |
| | | | GDRVTITCRASQGINTWLAWYQQKPGKAPKLLIYGASGLQSGVPSRFSG |
| | | | SGSGTDFTLTISSLQPEDFATYYCQQAKSFPRTFGQGTKVEIK |
| 776 | MS_5-F11_clipopt | artificial | QVQLVESGGGLVKPGGSLRLSCAASGFTFSDYYMTWIRQAPGKGLEWLS |
| | | | YISSSGSTIYYADSVKGRFTISRDNAKNSLFLQMNSLRAEDTAVYYCAR |
| | | | DRNSHFDYWGQGTLVTVSSGGGGQGGGGQGGGGQEIQMTQSPSSVSASV |
| | | | GDRVTITCRASQGINTWLAWYQQKPGKAPKLLIYGASGLQSGVPSRFSG |
| | | | SGSGTDFTLTISSLQPEDFATYYCQQAKSFPRTFGQGTKVEIK |
| 777 | MU_8-B7_CC | artificial | QVQLQQWGAGLLKPSETLSLTCAVYGGSFSGYYWSWIRQPPGKCLEWIG |
| | | | DIDASGSTKYNPSLKSRVTISLDTSKNQFSLKLNSVTAADTAVYFCARK |
| | | | KYSTVWSYFDNWGQGTLVTVSSGGGGSGGGGSGGGGSSYELTQPSSVSV |
| | | | PPGQTASITCSGDKLGDKYASWYQQKPGQSPVLVIYQDRKRPSGVPERF |
| | | | SGSNSGNTATLTISGTQAMDEADYYCQAWGSSTAVFGCGTKLTVL |
| 778 | MU_8-B7_CC_clipopt | artificial | QVQLQQWGAGLLKPSETLSLTCAVYGGSFSGYYWSWIRQPPGKCLEWIG |
| | | | DIDASGSTKYNPSLKSRVTISLDTSKNQFSLKLNSVTAADTAVYFCARK |
| | | | KYSTVWSYFDNWGQGTLVTVSSGGGGQGGGGQGGGGQSYELTQPSSVSV |
| | | | PPGQTASITCSGDKLGDKYASWYQQKPGQSPVLVIYQDRKRPSGVPERF |
| | | | SGSNSGNTATLTISGTQAMDEADYYCQAWGSSTAVFGCGTKLTVL |
| 779 | PM_76-B10 | artificial | QVQLVESGGGLVKPGESLRLSCAASGFTFSDYYMYWVRQAPGKGLEWVA |
| | | | IISDGGYYTYYSDIIKGRFTISRDNAKNSLYLQMNSLKAEDTAVYYCAR |
| | | | GFPLLRHGAMDYWGQGTLVTVSSGGGGSGGGGSGGGGSDIQMTQSPSSL |
| | | | SASVGDRVTITCKASQNVDTNVAWYQQKPGQAPKSLIYSASYRYSDVPS |
| | | | RFSGSASGTDFTLTISSVQSEDFATYYCQQYDSYPYTFGGGTKLEIK |
| 780 | PM_76-B10.11_CC | artificial | QVQLVESGGGLVKPGESLRLSCAASGFTFSDYYMYWVRQAPGKCLEWVA |
| | | | IISDGGYYTYYSDIIKGRFTISRDNAKNSLYLQMNSLKAEDTAVYYCAR |
| | | | GFPLLRHGAMDYWGQGTLVTVSSGGGGSGGGGSGGGGSDIQMTQSPSSL |
| | | | SASVGDRVTITCKASQNVDTNVAWYQQKPGQAPKSLIYSASYVYWDVPS |
| | | | RFSGSASGTDFTLTISSVQSEDFATYYCQQYDQQLITFGCGTKLEIK |
| 781 | PM_76-B10.11_CC_GQ | artificial | QVQLVESGGGLVKPGESLRLSCAASGFTFSDYYMYWVRQAPGKCLEWVA |
| | | | IISDGGYYTYYSDIIKGRFTISRDNAKNSLYLQMNSLKAEDTAVYYCAR |
| | | | GFPLLRHGAMDYWGQGTLVTVSSGGGGQGGGGQGGGGQDIQMTQSPSSL |
| | | | SASVGDRVTITCKASQNVDTNVAWYQQKPGQAPKSLIYSASYVYWDVPS |
| | | | RFSGSASGTDFTLTISSVQSEDFATYYCQQYDQQLITFGCGTKLEIK |
| 782 | PM_76- | artificial | QVQLVESGGGLVKPGESLRLSCAASGFTFSDYYMYWVRQAPGKCLEWVA |
| | B10.11_CC_clipopt | | IISDGGYYTYYSDIIKGRFTISRDNAKNSLYLQMNSLKAEDTAVYYCAR |
| | | | GFPLLRHGAMDYWGQGTLVTVSSGGGGQGGGGQGGGGQEIQMTQSPSSL |
| | | | SASVGDRVTITCKASQNVDTNVAWYQQKPGQAPKSLIYSASYVYWDVPS |
| | | | RFSGSASGTDFTLTISSVQSEDFATYYCQQYDQQLITFGCGTKLEIK |
| 783 | PM_76-B10_clipopt | artificial | QVQLVESGGGLVKPGESLRLSCAASGFTFSDYYMYWVRQAPGKGLEWVA |
| | | | IISDGGYYTYYSDIIKGRFTISRDNAKNSLYLQMNSLKAEDTAVYYCAR |
| | | | GFPLLRHGAMDYWGQGTLVTVSSGGGGQGGGGQGGGGQEIQMTQSPSSL |
| | | | SASVGDRVTITCKASQNVDTNVAWYQQKPGQAPKSLIYSASYRYSDVPS |
| | | | RFSGSASGTDFTLTISSVQSEDFATYYCQQYDSYPYTFGGGTKLEIK |
| 784 | BC_A7_27-C4- | artificial | QVQLVQSGAEVKKPGASVKVSCKASGYTFTNHIIHWVRQAPGQGLEWMG |
| | G7X_x_I2C_clipopt | | YINPYPGYHAYNEKFQGRATMTSDTSTSTVYMELSSLRSEDTAVYYCAR |
| | | | DGYYRDTDVLDYWGQGTLVTVSSGGGGQGGGGQGGGGQEIQMTQSPSSL |
| | | | SASVGDRVTITCQASQDISNYLNWYQQKPGKAPKLLIYYTSRLHTGVPS |
| | | | RFSGSGSGTDFTFTISSLEPEDIATYYCQQGNTLPWTFGQGTKVEIKSG |
| | | | GGGQEVQLVESGGGLVQPGGSLKLSCAASGFTFNKYAMNWVRQAPGKGL |
| | | | EWVARIRSKYNNYATYYADSVKDRFTISRDDSKNTAYLQMNNLKTEDTA |
| | | | VYYCVRHGNFGNSYISYWAYWGQGTLVTVSSGGGGQGGGGQGGGGQQTV |
| | | | VTQEPSLTVSPGGTVTLTCGSSTGAVTSGNYPNWVQQKPGQAPRGLIGG |
| | | | TKFLAPGTPARFSGSLLGGKAALTLSGVQPEDEAEYYCVLWYSNRWVFG |
| | | | GGTKLTVL |
| 785 | BC_A7_27-C4-G7xI2C | artificial | QVQLVQSGAEVKKPGASVKVSCKASGYTFTNHIIHWVRQAPGQGLEWMG |
| | | | YINPYPGYHAYNEKFQGRATMTSDTSTSTVYMELSSLRSEDTAVYYCAR |
| | | | DGYYRDTDVLDYWGQGTLVTVSSGGGGSGGGGSGGGGSDIQMTQSPSSL |
| | | | SASVGDRVTITCQASQDISNYLNWYQQKPGKAPKLLIYYTSRLHTGVPS |
| | | | RFSGSGSGTDFTFTISSLEPEDIATYYCQQGNTLPWTFGQGTKVEIKSG |
| | | | GGGSEVQLVESGGGLVQPGGSLKLSCAASGFTENKYAMNWVRQAPGKGL |
| | | | EWVARIRSKYNNYATYYADSVKDRFTISRDDSKNTAYLQMNNLKTEDTA |
| | | | VYYCVRHGNFGNSYISYWAYWGQGTLVTVSSGGGGSGGGGSGGGGSQTV |
| | | | VTQEPSLTVSPGGTVTLTCGSSTGAVTSGNYPNWVQQKPGQAPRGLIGG |
| | | | TKFLAPGTPARFSGSLLGGKAALTLSGVQPEDEAEYYCVLWYSNRWVFG |
| | | | GGTKLTVL |
| 786 | CD33_E11_x_I2C_ | artificial | QVQLVQSGAEVKKPGESVKVSCKASGYTFTNYGMNWVKQAPGQGLEWMG |
| | clipopt | | WINTYTGEPTYADKFQGRVTMTTDTSTSTAYMEIRNLGGDDTAVYYCAR |
| | | | WSWSDGYYVYFDYWGQGTSVTVSSGGGGQGGGGQGGGGQEIVMTQSPDS |
| | | | LTVSLGERTTINCKSSQSVLDSSTNKNSLAWYQQKPGQPPKLLLSWAST |
| | | | RESGIPDRFSGSGSGTDFTLTIDSPQPEDSATYYCQQSAHFPITFGQGT |
| | | | RLEIKSGGGGQEVQLVESGGGLVQPGGSLKLSCAASGFTENKYAMNWVR |
| | | | QAPGKGLEWVARIRSKYNNYATYYADSVKDRFTISRDDSKNTAYLQMNN |
| | | | LKTEDTAVYYCVRHGNFGNSYISYWAYWGQGTLVTVSSGGGGQGGGGQG |
| | | | GGGQQTVVTQEPSLTVSPGGTVTLTCGSSTGAVTSGNYPNWVQQKPGQA |
| | | | PRGLIGGTKFLAPGTPARFSGSLLGGKAALTLSGVQPEDEAEYYCVLWY |
| | | | SNRWVFGGGTKLTVL |
| 787 | CD33_E11xI2C | artificial | QVQLVQSGAEVKKPGESVKVSCKASGYTFTNYGMNWVKQAPGQGLEWMG |
| | | | WINTYTGEPTYADKFQGRVTMTTDTSTSTAYMEIRNLGGDDTAVYYCAR |
| | | | WSWSDGYYVYFDYWGQGTSVTVSSGGGGSGGGGSGGGGSDIVMTQSPDS |
| | | | LTVSLGERTTINCKSSQSVLDSSTNKNSLAWYQQKPGQPPKLLLSWAST |
| | | | RESGIPDRFSGSGSGTDFTLTIDSPQPEDSATYYCQQSAHFPITFGQGT |
| | | | RLEIKSGGGGSEVQLVESGGGLVQPGGSLKLSCAASGFTFNKYAMNWVR |
| | | | QAPGKGLEWVARIRSKYNNYATYYADSVKDRFTISRDDSKNTAYLQMNN |
| | | | LKTEDTAVYYCVRHGNFGNSYISYWAYWGQGTLVTVSSGGGGSGGGGSG |
| | | | GGGSQTVVTQEPSLTVSPGGTVTLTCGSSTGAVTSGNYPNWVQQKPGQA |
| | | | PRGLIGGTKFLAPGTPARFSGSLLGGKAALTLSGVQPEDEAEYYCVLWY |
| | | | SNRWVFGGGTKLTVL |
| 788 | EGFRvIII_CCxI2C | artificial | QVQLVESGGGVVQSGRSLRLSCAASGFTFRNYGMHWVRQAPGKCLEWVA |
| | | | VIWYDGSDKYYADSVRGRFTISRDNSKNTLYLQMNSLRAEDTAVYYCAR |
| | | | DGYDILTGNPRDFDYWGQGTLVTVSSGGGGSGGGGSGGGGSDTVMTQTP |
| | | | LSSHVTLGQPASISCRSSQSLVHSDGNTYLSWLQQRPGQPPRLLIYRIS |
| | | | RRFSGVPDRFSGSGAGTDFTLEISRVEAEDVGVYYCMQSTHVPRTFGCG |
| | | | TKVEIKSGGGGSEVQLVESGGGLVQPGGSLKLSCAASGFTENKYAMNWV |
| | | | RQAPGKGLEWVARIRSKYNNYATYYADSVKDRFTISRDDSKNTAYLQMN |
| | | | NLKTEDTAVYYCVRHGNFGNSYISYWAYWGQGTLVTVSSGGGGSGGGGS |
| | | | GGGGSQTVVTQEPSLTVSPGGTVTLTCGSSTGAVTSGNYPNWVQQKPGQ |
| | | | APRGLIGGTKFLAPGTPARFSGSLLGGKAALTLSGVQPEDEAEYYCVLW |
| | | | YSNRWVFGGGTKLTVL |
| 789 | EGFRvIII_CCx_I2C_ | artificial | QVQLVESGGGVVQSGRSLRLSCAASGFTFRNYGMHWVRQAPGKCLEWVA |
| | clipopt | | VIWYDGSDKYYADSVRGRFTISRDNSKNTLYLQMNSLRAEDTAVYYCAR |
| | | | DGYDILTGNPRDFDYWGQGTLVTVSSGGGGQGGGGQGGGGQDTVMTQTP |
| | | | LSSHVTLGQPASISCRSSQSLVHSDGNTYLSWLQQRPGQPPRLLIYRIS |
| | | | RRFSGVPDRFSGSGAGTDFTLEISRVEAEDVGVYYCMQSTHVPRTFGCG |
| | | | TKVEIKSGGGGQEVQLVESGGGLVQPGGSLKLSCAASGFTENKYAMNWV |
| | | | RQAPGKGLEWVARIRSKYNNYATYYADSVKDRFTISRDDSKNTAYLQMN |
| | | | NLKTEDTAVYYCVRHGNFGNSYISYWAYWGQGTLVTVSSGGGGQGGGGQ |
| | | | GGGGQQTVVTQEPSLTVSPGGTVTLTCGSSTGAVTSGNYPNWVQQKPGQ |
| | | | APRGLIGGTKFLAPGTPARFSGSLLGGKAALTLSGVQPEDEAEYYCVLW |
| | | | YSNRWVFGGGTKLTVL |
| 790 | PM_76- | artificial | QVQLVESGGGLVKPGESLRLSCAASGFTFSDYYMYWVRQAPGKGLEWVA |
| | B10_x_I2C_clipopt | | IISDGGYYTYYSDIIKGRFTISRDNAKNSLYLQMNSLKAEDTAVYYCAR |
| | | | GFPLLRHGAMDYWGQGTLVTVSSGGGGQGGGGQGGGGQEIQMTQSPSSL |
| | | | SASVGDRVTITCKASQNVDTNVAWYQQKPGQAPKSLIYSASYRYSDVPS |
| | | | RFSGSASGTDFTLTISSVQSEDFATYYCQQYDSYPYTFGGGTKLEIKSG |
| | | | GGGQEVQLVESGGGLVQPGGSLKLSCAASGFTFNKYAMNWVRQAPGKGL |
| | | | EWVARIRSKYNNYATYYADSVKDRFTISRDDSKNTAYLQMNNLKTEDTA |
| | | | VYYCVRHGNFGNSYISYWAYWGQGTLVTVSSGGGGQGGGGQGGGGQQTV |
| | | | VTQEPSLTVSPGGTVTLTCGSSTGAVTSGNYPNWVQQKPGQAPRGLIGG |
| | | | TKFLAPGTPARFSGSLLGGKAALTLSGVQPEDEAEYYCVLWYSNRWVFG |
| | | | GGTKLTVL |
| 791 | PM_76-B10xI2C | artificial | QVQLVESGGGLVKPGESLRLSCAASGFTFSDYYMYWVRQAPGKGLEWVA |
| | | | IISDGGYYTYYSDIIKGRFTISRDNAKNSLYLQMNSLKAEDTAVYYCAR |
| | | | GFPLLRHGAMDYWGQGTLVTVSSGGGGSGGGGSGGGGSDIQMTQSPSSL |
| | | | SASVGDRVTITCKASQNVDTNVAWYQQKPGQAPKSLIYSASYRYSDVPS |
| | | | RFSGSASGTDFTLTISSVQSEDFATYYCQQYDSYPYTFGGGTKLEIKSG |
| | | | GGGSEVQLVESGGGLVQPGGSLKLSCAASGFTFNKYAMNWVRQAPGKGL |
| | | | EWVARIRSKYNNYATYYADSVKDRFTISRDDSKNTAYLQMNNLKTEDTA |
| | | | VYYCVRHGNFGNSYISYWAYWGQGTLVTVSSGGGGSGGGGSGGGGSQTV |
| | | | VTQEPSLTVSPGGTVTLTCGSSTGAVTSGNYPNWVQQKPGQAPRGLIGG |
| | | | TKFLAPGTPARFSGSLLGGKAALTLSGVQPEDEAEYYCVLWYSNRWVFG |
| | | | GGTKLTVL |
| 792 | 11D | artificial | QVQLVESGGGLVKPGESLRLSCAASGFTFSDYYMYWVRQAPGKCLEWVA |
| | | | IISDGGYYTYYSDIIKGRFTISRDNAKNSLYLQMNSLKAEDTAVYYCAR |
| | | | GFPLLRHGAMDYWGQGTLVTVSSGGGGSGGGGSGGGGSDIQMTQSPSSL |
| | | | SASVGDRVTITCKASQNVDTNVAWYQQKPGQAPKSLIYSASYVYWDVPS |
| | | | RFSGSASGTDFTLTISSVQSEDFATYYCQQYDQQLITFGCGTKLEIKSG |
| | | | GGGSEVQLVESGGGLVQPGGSLKLSCAASGFTFNKYAMNWVRQAPGKGL |
| | | | EWVARIRSKYNNYATYYADSVKDRFTISRDDSKNTAYLQMNNLKTEDTA |
| | | | VYYCVRHGNFGNSYISYWAYCGQGTLVTVSSGGGGSGGGGSGGGGSQTV |
| | | | VTQEPSLTVSPGGTVTLTCGSSTGAVTSGNYPNWVQQKPGQCPRGLIGG |
| | | | TKFLAPGTPARFSGSLLGGKAALTLSGVQPEDEAEYYCVLWYSNRWVFG |
| | | | GGTKLTVLGGGGDKTHTCPPCPAPELLGGPSVFLFPPKPKDTLMISRTP |
| | | | EVTCVVVDVSHEDPEVKFNWYVDGVEVHNAKTKPCEEQYGSTYRCVSVL |
| | | | TVLHQDWLNGKEYKCKVSNKALPAPIEKTISKAKGQPREPQVYTLPPSR |
| | | | EEMTKNQVSLTCLVKGFYPSDIAVEWESNGQPENNYKTTPPVLDSDGSF |
| | | | FLYSKLTVDKSRWQQGNVFSCSVMHEALHNHYTQKSLSLSPGKGGGGSG |
| | | | GGGSGGGGSGGGGSGGGGSGGGGSDKTHTCPPCPAPELLGGPSVFLFPP |
| | | | KPKDTLMISRTPEVTCVVVDVSHEDPEVKENWYVDGVEVHNAKTKPCEE |
| | | | QYGSTYRCVSVLTVLHQDWLNGKEYKCKVSNKALPAPIEKTISKAKGQP |
| | | | REPQVYTLPPSREEMTKNQVSLTCLVKGFYPSDIAVEWESNGQPENNYK |
| | | | TTPPVLDSDGSFFLYSKLTVDKSRWQQGNVFSCSVMHEALHNHYTQKSL |
| | | | SLSPGK |
| 793 | BC_A7_27-C4- | artificial | QVQLVQSGAEVKKPGASVKVSCKASGYTFTNHIIHWVRQAPGQCLEWMG |
| | G7_CC_x_I2C_x_scFc | | YINPYPGYHAYNEKFQGRATMTSDTSTSTVYMELSSLRSEDTAVYYCAR |
| | | | DGYYRDTDVLDYWGQGTLVTVSSGGGGSGGGGSGGGGSDIQMTQSPSSL |
| | | | SASVGDRVTITCQASQDISNYLNWYQQKPGKAPKLLIYYTSRLHTGVPS |
| | | | RFSGSGSGTDFTFTISSLEPEDIATYYCQQGNTLPWTFGCGTKVEIKSG |
| | | | GGGSEVQLVESGGGLVQPGGSLKLSCAASGFTFNKYAMNWVRQAPGKGL |
| | | | EWVARIRSKYNNYATYYADSVKDRFTISRDDSKNTAYLQMNNLKTEDTA |
| | | | VYYCVRHGNFGNSYISYWAYWGQGTLVTVSSGGGGSGGGGSGGGGSQTV |
| | | | VTQEPSLTVSPGGTVTLTCGSSTGAVTSGNYPNWVQQKPGQAPRGLIGG |
| | | | TKFLAPGTPARFSGSLLGGKAALTLSGVQPEDEAEYYCVLWYSNRWVFG |
| | | | GGTKLTVLGGGGDKTHTCPPCPAPELLGGPSVFLFPPKPKDTLMISRTP |
| | | | EVTCVVVDVSHEDPEVKFNWYVDGVEVHNAKTKPCEEQYGSTYRCVSVL |
| | | | TVLHQDWLNGKEYKCKVSNKALPAPIEKTISKAKGQPREPQVYTLPPSR |
| | | | EEMTKNQVSLTCLVKGFYPSDIAVEWESNGQPENNYKTTPPVLDSDGSF |
| | | | FLYSKLTVDKSRWQQGNVFSCSVMHEALHNHYTQKSLSLSPGKGGGGSG |
| | | | GGGSGGGGSGGGGSGGGGSGGGGSDKTHTCPPCPAPELLGGPSVFLFPP |
| | | | KPKDTLMISRTPEVTCVVVDVSHEDPEVKFNWYVDGVEVHNAKTKPCEE |
| | | | QYGSTYRCVSVLTVLHQDWLNGKEYKCKVSNKALPAPIEKTISKAKGQP |
| | | | REPQVYTLPPSREEMTKNQVSLTCLVKGFYPSDIAVEWESNGQPENNYK |
| | | | TTPPVLDSDGSFFLYSKLTVDKSRWQQGNVFSCSVMHEALHNHYTQKSL |
| | | | SLSPGK |
| 794 | BC_A7_27-C4- | artificial | QVQLVQSGAEVKKPGASVKVSCKASGYTFTNHIIHWVRQAPGQCLEWMG |
| | G7_CC_x_I2C_x_scFc_ | | YINPYPGYHAYNEKFQGRATMTSDTSTSTVYMELSSLRSEDTAVYYCAR |
| | clipopt | | DGYYRDTDVLDYWGQGTLVTVSSGGGGQGGGGQGGGGQEIQMTQSPSSL |
| | | | SASVGDRVTITCQASQDISNYLNWYQQKPGKAPKLLIYYTSRLHTGVPS |
| | | | RFSGSGSGTDFTFTISSLEPEDIATYYCQQGNTLPWTFGCGTKVEIKSG |
| | | | GGGQEVQLVESGGGLVQPGGSLKLSCAASGFTFNKYAMNWVRQAPGKGL |
| | | | EWVARIRSKYNNYATYYADSVKDRFTISRDDSKNTAYLQMNNLKTEDTA |
| | | | VYYCVRHGNFGNSYISYWAYWGQGTLVTVSSGGGGQGGGGQGGGGQQTV |
| | | | VTQEPSLTVSPGGTVTLTCGSSTGAVTSGNYPNWVQQKPGQAPRGLIGG |
| | | | TKFLAPGTPARFSGSLLGGKAALTLSGVQPEDEAEYYCVLWYSNRWVFG |
| | | | GGTKLTVLGGGGCPPCPAPELLGGPSVFLFPPKPKDTLMISRTPEVTCV |
| | | | VVDVSHEEPEVKFNWYVDGVEVHNAKTKPCEEQYGSTYRCVSVLTVLHQ |
| | | | DWLNGKEYKCKVSNKALPAPIEKTISKAKGQPREPQVYTLPPSREEMTK |
| | | | NQVSLTCLVKGFYPSDIAVEWESNGQPENNYKTTPPVLDSDGSFFLYSK |
| | | | LTVDKSRWQQGNVFSCSVMHEALHNHYTQKSLSLSPGKGGGGQGGGGQG |
| | | | GGGQGGGGQGGGGQGGGGQCPPCPAPELLGGPSVFLFPPKPKDTLMISR |
| | | | TPEVTCVVVDVSHEEPEVKENWYVDGVEVHNAKTKPCEEQYGSTYRCVS |
| | | | VLTVLHQDWLNGKEYKCKVSNKALPAPIEKTISKAKGQPREPQVYTLPP |
| | | | SREEMTKNQVSLTCLVKGFYPSDIAVEWESNGQPENNYKTTPPVLDSDG |
| | | | SFFLYSKLTVDKSRWQQGNVFSCSVMHEALHNHYTQKSLSLSPGK |
| 795 | CD19_97-G1RE- | artificial | DIVMTQSPLSLPVISGEPASISCRSSQSLLHKNAFNYLDWYLQKPGQSP |
| | C2_LH_CC_x_92C_x_ | | QLLIYLGSNRASGVPDRFSGSGSGTDFTLKISRVEAEDVGVYYCMQALQ |
| | scFc | | TPFTFGCGTKVDIKGGGGSGGGGSGGGGSQVQLVESGGGVVQPGRSLRL |
| | | | SCAASGFTFSSYGMHWVRQAPGKCLEWVAVISYEGSNKYYAESVKGRFT |
| | | | ISRDNSKNTLYLQMNSLRDEDTAVYYCARDRGTIFGNYGLEVWGQGTTV |
| | | | TVSSSGGGGSEVQLVESGGGLVQPGGSLKLSCAASGFTENKYAMNWVRQ |
| | | | APGKGLEWVARIRSKYNNYATYYADSVKDRFTISRDDSKNTAYLQMNNL |
| | | | KTEDTAVYYCVRHGNFGNSYISYWAYWGQGTLVTVSSGGGGSGGGGSGG |
| | | | GGSQTVVTQEPSLTVSPGGTVTLTCGSSTGAVTSGNYPNWVQQKPGQAP |
| | | | RGLIGGTKFLAPGTPARFSGSLLGGKAALTLSGVQPEDEAEYYCVLWYS |
| | | | NRWVFGGGTKLTVLGGGGDKTHTCPPCPAPELLGGPSVFLFPPKPKDTL |
| | | | MISRTPEVTCVVVDVSHEDPEVKFNWYVDGVEVHNAKTKPCEEQYGSTY |
| | | | RCVSVLTVLHQDWLNGKEYKCKVSNKALPAPIEKTISKAKGQPREPQVY |
| | | | TLPPSREEMTKNQVSLTCLVKGFYPSDIAVEWESNGQPENNYKTTPPVL |
| | | | DSDGSFFLYSKLTVDKSRWQQGNVFSCSVMHEALHNHYTQKSLSLSPGK |
| | | | GGGGSGGGGSGGGGSGGGGSGGGGSGGGGSDKTHTCPPCPAPELLGGPS |
| | | | VFLFPPKPKDTLMISRTPEVTCVVVDVSHEDPEVKENWYVDGVEVHNAK |
| | | | TKPCEEQYGSTYRCVSVLTVLHQDWLNGKEYKCKVSNKALPAPIEKTIS |
| | | | KAKGQPREPQVYTLPPSREEMTKNQVSLTCLVKGFYPSDIAVEWESNGQ |
| | | | PENNYKTTPPVLDSDGSFFLYSKLTVDKSRWQQGNVFSCSVMHEALHNH |
| | | | YTQKSLSLSPGK |
| 796 | CD19_97-G1RE- | artificial | DIVMTQSPLSLPVISGEPASISCRSSQSLLHKNAFNYLDWYLQKPGQSP |
| | C2_LH_CC_x_I2C_x_ | | QLLIYLGSNRASGVPDRFSGSGSGTDFTLKISRVEAEDVGVYYCMQALQ |
| | scFc-S | | TPFTFGCGTKVDIKGGGGSGGGGSGGGGSQVQLVESGGGVVQPGRSLRL |
| | | | SCAASGFTFSSYGMHWVRQAPGKCLEWVAVISYEGSNKYYAESVKGRFT |
| | | | ISRDNSKNTLYLQMNSLRDEDTAVYYCARDRGTIFGNYGLEVWGQGTTV |
| | | | TVSSGGGGSEVQLVESGGGLVQPGGSLKLSCAASGFTFNKYAMNWVRQA |
| | | | PGKGLEWVARIRSKYNNYATYYADSVKDRFTISRDDSKNTAYLQMNNLK |
| | | | TEDTAVYYCVRHGNFGNSYISYWAYWGQGTLVTVSSGGGGSGGGGSGGG |
| | | | GSQTVVTQEPSLTVSPGGTVTLTCGSSTGAVTSGNYPNWVQQKPGQAPR |
| | | | GLIGGTKFLAPGTPARFSGSLLGGKAALTLSGVQPEDEAEYYCVLWYSN |
| | | | RWVFGGGTKLTVLGGGGDKTHTCPPCPAPELLGGPSVFLFPPKPKDTLM |
| | | | ISRTPEVTCVVVDVSHEDPEVKFNWYVDGVEVHNAKTKPCEEQYGSTYR |
| | | | CVSVLTVLHQDWLNGKEYKCKVSNKALPAPIEKTISKAKGQPREPQVYT |
| | | | LPPSREEMTKNQVSLTCLVKGFYPSDIAVEWESNGQPENNYKTTPPVLD |
| | | | SDGSFFLYSKLTVDKSRWQQGNVFSCSVMHEALHNHYTQKSLSLSPGKG |
| | | | GGGSGGGGSGGGGSGGGGSGGGGSGGGGSDKTHTCPPCPAPELLGGPSV |
| | | | FLFPPKPKDTLMISRTPEVTCVVVDVSHEDPEVKENWYVDGVEVHNAKT |
| | | | KPCEEQYGSTYRCVSVLTVLHQDWLNGKEYKCKVSNKALPAPIEKTISK |
| | | | AKGQPREPQVYTLPPSREEMTKNQVSLTCLVKGFYPSDIAVEWESNGQP |
| | | | ENNYKTTPPVLDSDGSFFLYSKLTVDKSRWQQGNVFSCSVMHEALHNHY |
| | | | TQKSLSLSPGK |
| 797 | CD19_97-G1RE- | artificial | DIVMTQSPLSLPVISGEPASISCRSSQSLLHKNAFNYLDWYLQKPGQSP |
| | C2_LH_CC_x_I2C_x_Sc | | QLLIYLGSNRASGVPDRFSGSGSGTDFTLKISRVEAEDVGVYYCMQALQ |
| | Fc_clipopt | | TPFTFGCGTKVDIKGGGGQGGGGQGGGGQQVQLVESGGGVVQPGRSLRL |
| | | | SCAASGFTFSSYGMHWVRQAPGKCLEWVAVISYEGSNKYYAESVKGRFT |
| | | | ISRDNSKNTLYLQMNSLRDEDTAVYYCARDRGTIFGNYGLEVWGQGTTV |
| | | | TVSSGGGGQEVQLVESGGGLVQPGGSLKLSCAASGFTFNKYAMNWVRQA |
| | | | PGKGLEWVARIRSKYNNYATYYADSVKDRFTISRDDSKNTAYLQMNNLK |
| | | | TEDTAVYYCVRHGNFGNSYISYWAYWGQGTLVTVSSGGGGQGGGGQGGG |
| | | | GQQTVVTQEPSLTVSPGGTVTLTCGSSTGAVTSGNYPNWVQQKPGQAPR |
| | | | GLIGGTKFLAPGTPARFSGSLLGGKAALTLSGVQPEDEAEYYCVLWYSN |
| | | | RWVFGGGTKLTVLGGGGCPPCPAPELLGGPSVFLFPPKPKDTLMISRTP |
| | | | EVTCVVVDVSHEEPEVKENWYVDGVEVHNAKTKPCEEQYGSTYRCVSVL |
| | | | TVLHQDWLNGKEYKCKVSNKALPAPIEKTISKAKGQPREPQVYTLPPSR |
| | | | EEMTKNQVSLTCLVKGFYPSDIAVEWESNGQPENNYKTTPPVLDSDGSF |
| | | | FLYSKLTVDKSRWQQGNVFSCSVMHEALHNHYTQKSLSLSPGKGGGGQG |
| | | | GGGQGGGGQGGGGQGGGGQGGGGQCPPCPAPELLGGPSVFLFPPKPKDT |
| | | | LMISRTPEVTCVVVDVSHEEPEVKENWYVDGVEVHNAKTKPCEEQYGST |
| | | | YRCVSVLTVLHQDWLNGKEYKCKVSNKALPAPIEKTISKAKGQPREPQV |
| | | | YTLPPSREEMTKNQVSLTCLVKGFYPSDIAVEWESNGQPENNYKTTPPV |
| | | | LDSDGSFFLYSKLTVDKSRWQQGNVFSCSVMHEALHNHYTQKSLSLSPG |
| | | | K |
| 798 | CD33_E11_CC_x_I2C_x | artificial | QVQLVQSGAEVKKPGESVKVSCKASGYTFTNYGMNWVKQAPGQCLEWMG |
| | scFc/_Z5S | | WINTYTGEPTYADKFQGRVTMTTDTSTSTAYMEIRNLGGDDTAVYYCAR |
| | | | WSWSDGYYVYFDYWGQGTSVTVSSGGGGSGGGGSGGGGSDIVMTQSPDS |
| | | | LTVSLGERTTINCKSSQSVLDSSTNKNSLAWYQQKPGQPPKLLLSWAST |
| | | | RESGIPDRFSGSGSGTDFTLTIDSPQPEDSATYYCQQSAHFPITFGCGT |
| | | | RLEIKSGGGGSEVQLVESGGGLVQPGGSLKLSCAASGFTFNKYAMNWVR |
| | | | QAPGKGLEWVARIRSKYNNYATYYADSVKDRFTISRDDSKNTAYLQMNN |
| | | | LKTEDTAVYYCVRHGNFGNSYISYWAYWGQGTLVTVSSGGGGSGGGGSG |
| | | | GGGSQTVVTQEPSLTVSPGGTVTLTCGSSTGAVTSGNYPNWVQQKPGQA |
| | | | PRGLIGGTKFLAPGTPARFSGSLLGGKAALTLSGVQPEDEAEYYCVLWY |
| | | | SNRWVFGGGTKLTVLGGGGDKTHTCPPCPAPELLGGPSVFLFPPKPKDT |
| | | | LMISRTPEVTCVVVDVSHEDPEVKFNWYVDGVEVHNAKTKPCEEQYGST |
| | | | YRCVSVLTVLHQDWLNGKEYKCKVSNKALPAPIEKTISKAKGQPREPQV |
| | | | YTLPPSREEMTKNQVSLTCLVKGFYPSDIAVEWESNGQPENNYKTTPPV |
| | | | LDSDGSFFLYSKLTVDKSRWQQGNVFSCSVMHEALHNHYTQKSLSLSPG |
| | | | KGGGGSGGGGSGGGGSGGGGSGGGGSGGGGSDKTHTCPPCPAPELLGGP |
| | | | SVFLFPPKPKDTLMISRTPEVTCVVVDVSHEDPEVKFNWYVDGVEVHNA |
| | | | KTKPCEEQYGSTYRCVSVLTVLHQDWLNGKEYKCKVSNKALPAPIEKTI |
| | | | SKAKGQPREPQVYTLPPSREEMTKNQVSLTCLVKGFYPSDIAVEWESNG |
| | | | QPENNYKTTPPVLDSDGSFFLYSKLTVDKSRWQQGNVFSCSVMHEALHN |
| | | | HYTQKSLSLSPGK |
| 799 | CD33_E11_CC_x_I2C_x | artificial | QVQLVQSGAEVKKPGESVKVSCKASGYTFTNYGMNWVKQAPGQCLEWMG |
| | scFc_clipopt | | WINTYTGEPTYADKFQGRVTMTTDTSTSTAYMEIRNLGGDDTAVYYCAR |
| | | | WSWSDGYYVYFDYWGQGTSVTVSSGGGGQGGGGQGGGGQEIVMTQSPDS |
| | | | LTVSLGERTTINCKSSQSVLDSSTNKNSLAWYQQKPGQPPKLLLSWAST |
| | | | RESGIPDRFSGSGSGTDFTLTIDSPQPEDSATYYCQQSAHFPITFGCGT |
| | | | RLEIKSGGGGQEVQLVESGGGLVQPGGSLKLSCAASGFTFNKYAMNWVR |
| | | | QAPGKGLEWVARIRSKYNNYATYYADSVKDRFTISRDDSKNTAYLQMNN |
| | | | LKTEDTAVYYCVRHGNFGNSYISYWAYWGQGTLVTVSSGGGGQGGGGQG |
| | | | GGGQQTVVTQEPSLTVSPGGTVTLTCGSSTGAVTSGNYPNWVQQKPGQA |
| | | | PRGLIGGTKFLAPGTPARFSGSLLGGKAALTLSGVQPEDEAEYYCVLWY |
| | | | SNRWVFGGGTKLTVLGGGGCPPCPAPELLGGPSVFLFPPKPKDTLMISR |
| | | | TPEVTCVVVDVSHEEPEVKENWYVDGVEVHNAKTKPCEEQYGSTYRCVS |
| | | | VLTVLHQDWLNGKEYKCKVSNKALPAPIEKTISKAKGQPREPQVYTLPP |
| | | | SREEMTKNQVSLTCLVKGFYPSDIAVEWESNGQPENNYKTTPPVLDSDG |
| | | | SFFLYSKLTVDKSRWQQGNVFSCSVMHEALHNHYTQKSLSLSPGKGGGG |
| | | | QGGGGQGGGGQGGGGQGGGGQGGGGQCPPCPAPELLGGPSVFLFPPKPK |
| | | | DTLMISRTPEVTCVVVDVSHEEPEVKENWYVDGVEVHNAKTKPCEEQYG |
| | | | STYRCVSVLTVLHQDWLNGKEYKCKVSNKALPAPIEKTISKAKGQPREP |
| | | | QVYTLPPSREEMTKNQVSLTCLVKGFYPSDIAVEWESNGQPENNYKTTP |
| | | | PVLDSDGSFFLYSKLTVDKSRWQQGNVFSCSVMHEALHNHYTQKSLSLS |
| | | | PGK |
| 800 | CD70_1_C7D_CC_x_I2C_ | artificial | EVQLLESGGGMVQPGGSLRLSCAASGFTFSTYAMSWVRQAPGKCLEWVS |
| | _scFc | | AISGSGGRTFYAESVEGRFTISRDNSKNTLYLQMNSLRAEDTAVYYCAK |
| | | | HDYSNYPYFDYWGQGTLVTVSSGGGGSGGGGSGGGGSEIVLTQSPGTLS |
| | | | LSPGERATLSCRASQSVRSTYLAWYQQKPGQAPRLLIYGASSRATGIPD |
| | | | RFSGSGSGTDFTLTISRLEPEDFAVYSCQQYGDLPFTFGCGTKLEIKSG |
| | | | GGGSEVQLVESGGGLVQPGGSLKLSCAASGFTFNKYAMNWVRQAPGKGL |
| | | | EWVARIRSKYNNYATYYADSVKDRFTISRDDSKNTAYLQMNNLKTEDTA |
| | | | VYYCVRHGNFGNSYISYWAYWGQGTLVTVSSGGGGSGGGGSGGGGSQTV |
| | | | VTQEPSLTVSPGGTVTLTCGSSTGAVTSGNYPNWVQQKPGQAPRGLIGG |
| | | | TKFLAPGTPARFSGSLLGGKAALTLSGVQPEDEAEYYCVLWYSNRWVFG |
| | | | GGTKLTVLGGGGDKTHTCPPCPAPELLGGPSVFLFPPKPKDTLMISRTP |
| | | | EVTCVVVDVSHEDPEVKFNWYVDGVEVHNAKTKPCEEQYGSTYRCVSVL |
| | | | TVLHQDWLNGKEYKCKVSNKALPAPIEKTISKAKGQPREPQVYTLPPSR |
| | | | EEMTKNQVSLTCLVKGFYPSDIAVEWESNGQPENNYKTTPPVLDSDGSF |
| | | | FLYSKLTVDKSRWQQGNVFSCSVMHEALHNHYTQKSLSLSPGKGGGGSG |
| | | | GGGSGGGGSGGGGSGGGGSGGGGSDKTHTCPPCPAPELLGGPSVFLFPP |
| | | | KPKDTLMISRTPEVTCVVVDVSHEDPEVKFNWYVDGVEVHNAKTKPCEE |
| | | | QYGSTYRCVSVLTVLHQDWLNGKEYKCKVSNKALPAPIEKTISKAKGQP |
| | | | REPQVYTLPPSREEMTKNQVSLTCLVKGFYPSDIAVEWESNGQPENNYK |
| | | | TTPPVLDSDGSFFLYSKLTVDKSRWQQGNVFSCSVMHEALHNHYTQKSL |
| | | | SLSPGK |
| 801 | CD70_1_C7D_CC_x_I2C_ | artificial | EVQLLESGGGMVQPGGSLRLSCAASGFTFSTYAMSWVRQAPGKCLEWVS |
| | x_scFc_clipopt | | AISGSGGRTFYAESVEGRFTISRDNSKNTLYLQMNSLRAEDTAVYYCAK |
| | | | HDYSNYPYFDYWGQGTLVTVSSGGGGQGGGGQGGGGQEIVLTQSPGTLS |
| | | | LSPGERATLSCRASQSVRSTYLAWYQQKPGQAPRLLIYGASSRATGIPD |
| | | | RFSGSGSGTDFTLTISRLEPEDFAVYSCQQYGDLPFTFGCGTKLEIKSG |
| | | | GGGQEVQLVESGGGLVQPGGSLKLSCAASGFTFNKYAMNWVRQAPGKGL |
| | | | EWVARIRSKYNNYATYYADSVKDRFTISRDDSKNTAYLQMNNLKTEDTA |
| | | | VYYCVRHGNFGNSYISYWAYWGQGTLVTVSSGGGGQGGGGQGGGGQQTV |
| | | | VTQEPSLTVSPGGTVTLTCGSSTGAVTSGNYPNWVQQKPGQAPRGLIGG |
| | | | TKFLAPGTPARFSGSLLGGKAALTLSGVQPEDEAEYYCVLWYSNRWVFG |
| | | | GGTKLTVLGGGGCPPCPAPELLGGPSVFLFPPKPKDTLMISRTPEVTCV |
| | | | VVDVSHEEPEVKFNWYVDGVEVHNAKTKPCEEQYGSTYRCVSVLTVLHQ |
| | | | DWLNGKEYKCKVSNKALPAPIEKTISKAKGQPREPQVYTLPPSREEMTK |
| | | | NQVSLTCLVKGFYPSDIAVEWESNGQPENNYKTTPPVLDSDGSFFLYSK |
| | | | LTVDKSRWQQGNVFSCSVMHEALHNHYTQKSLSLSPGKGGGGQGGGGQG |
| | | | GGGQGGGGQGGGGQGGGGQCPPCPAPELLGGPSVFLFPPKPKDTLMISR |
| | | | TPEVTCVVVDVSHEEPEVKFNWYVDGVEVHNAKTKPCEEQYGSTYRCVS |
| | | | VLTVLHQDWLNGKEYKCKVSNKALPAPIEKTISKAKGQPREPQVYTLPP |
| | | | SREEMTKNQVSLTCLVKGFYPSDIAVEWESNGQPENNYKTTPPVLDSDG |
| | | | SFFLYSKLTVDKSRWQQGNVFSCSVMHEALHNHYTQKSLSLSPGK |
| 802 | CH19_2G6.007_CC_x_ | artificial | QVQLVESGGGVVQPGGSLRLSCAASGFTFSSYGMHWVRQAPGKCLEWVA |
| | I2C_x_scFc_delGK | | FIWYEGSNKYYAESVKDRFTISRDNSKNTLYLQMNSLRAEDTAVYYCAR |
| | | | RAGIIGTIGYYYGMDVWGQGTTVTVSSGGGGSGGGGSGGGGSSYELTQP |
| | | | PSVSVSPGQTASITCSGDRLGEKYTSWYQQRPGQSPLLVIYQDTKRPSG |
| | | | IPERFSGSNSGNTATLTISGTQAMDEADYYCQAWESSTVVFGCGTKLTV |
| | | | LSGGGGSEVQLVESGGGLVQPGGSLKLSCAASGFTENKYAMNWVRQAPG |
| | | | KGLEWVARIRSKYNNYATYYADSVKDRFTISRDDSKNTAYLQMNNLKTE |
| | | | DTAVYYCVRHGNFGNSYISYWAYWGQGTLVTVSSGGGGSGGGGSGGGGS |
| | | | QTVVTQEPSLTVSPGGTVTLTCGSSTGAVTSGNYPNWVQQKPGQAPRGL |
| | | | IGGTKFLAPGTPARFSGSLLGGKAALTLSGVQPEDEAEYYCVLWYSNRW |
| | | | VFGGGTKLTVLGGGGDKTHTCPPCPAPELLGGPSVFLFPPKPKDTLMIS |
| | | | RTPEVTCVVVDVSHEDPEVKFNWYVDGVEVHNAKTKPCEEQYGSTYRCV |
| | | | SVLTVLHQDWLNGKEYKCKVSNKALPAPIEKTISKAKGQPREPQVYTLP |
| | | | PSREEMTKNQVSLTCLVKGFYPSDIAVEWESNGQPENNYKTTPPVLDSD |
| | | | GSFFLYSKLTVDKSRWQQGNVFSCSVMHEALHNHYTQKSLSLSPGGGGS |
| | | | GGGGSGGGGSGGGGSGGGGSGGGGSDKTHTCPPCPAPELLGGPSVFLFP |
| | | | PKPKDTLMISRTPEVTCVVVDVSHEDPEVKENWYVDGVEVHNAKTKPCE |
| | | | EQYGSTYRCVSVLTVLHQDWLNGKEYKCKVSNKALPAPIEKTISKAKGQ |
| | | | PREPQVYTLPPSREEMTKNQVSLTCLVKGFYPSDIAVEWESNGQPENNY |
| | | | KTTPPVLDSDGSFFLYSKLTVDKSRWQQGNVFSCSVMHEALHNHYTQKS |
| | | | LSLSPGK |
| 803 | CH19_2G6.007_CC_x_ | artificial | QVQLVESGGGVVQPGGSLRLSCAASGFTFSSYGMHWVRQAPGKCLEWVA |
| | I2C_x_scFc_delGK_ | | FIWYEGSNKYYAESVKDRFTISRDNSKNTLYLQMNSLRAEDTAVYYCAR |
| | clipopt | | RAGIIGTIGYYYGMDVWGQGTTVTVSSGGGGQGGGGQGGGGQSYELTQP |
| | | | PSVSVSPGQTASITCSGDRLGEKYTSWYQQRPGQSPLLVIYQDTKRPSG |
| | | | IPERFSGSNSGNTATLTISGTQAMDEADYYCQAWESSTVVFGCGTKLTV |
| | | | LSGGGGQEVQLVESGGGLVQPGGSLKLSCAASGFTFNKYAMNWVRQAPG |
| | | | KGLEWVARIRSKYNNYATYYADSVKDRFTISRDDSKNTAYLQMNNLKTE |
| | | | DTAVYYCVRHGNFGNSYISYWAYWGQGTLVTVSSGGGGQGGGGQGGGGQ |
| | | | QTVVTQEPSLTVSPGGTVTLTCGSSTGAVTSGNYPNWVQQKPGQAPRGL |
| | | | IGGTKFLAPGTPARFSGSLLGGKAALTLSGVQPEDEAEYYCVLWYSNRW |
| | | | VFGGGTKLTVLGGGGCPPCPAPELLGGPSVFLFPPKPKDTLMISRTPEV |
| | | | TCVVVDVSHEEPEVKFNWYVDGVEVHNAKTKPCEEQYGSTYRCVSVLTV |
| | | | LHQDWLNGKEYKCKVSNKALPAPIEKTISKAKGQPREPQVYTLPPSREE |
| | | | MTKNQVSLTCLVKGFYPSDIAVEWESNGQPENNYKTTPPVLDSDGSFFL |
| | | | YSKLTVDKSRWQQGNVFSCSVMHEALHNHYTQKSLSLSPGGGGQGGGGQ |
| | | | GGGGQGGGGQGGGGQGGGGQCPPCPAPELLGGPSVFLFPPKPKDTLMIS |
| | | | RTPEVTCVVVDVSHEEPEVKFNWYVDGVEVHNAKTKPCEEQYGSTYRCV |
| | | | SVLTVLHQDWLNGKEYKCKVSNKALPAPIEKTISKAKGQPREPQVYTLP |
| | | | PSREEMTKNQVSLTCLVKGFYPSDIAVEWESNGQPENNYKTTPPVLDSD |
| | | | GSFFLYSKLTVDKSRWQQGNVFSCSVMHEALHNHYTQKSLSLSPGK |
| 804 | CH3_G8A_6- | artificial | EVQLLESGGGLVQPGGSLRLSCAASGFSFSSYPINWVRQAPGKGLEWVG |
| | B12_x_I2C_x_scFc | | VIWTGGGTNYASSVKGRFTISRDNSKNTVYLQMNSLRAEDTAVYYCAKS |
| | | | RGVYDFDGRGAMDYWGQGTLVTVSSGGGGSGGGGSGGGGSDIVMTQSPD |
| | | | SLAVSLGERATINCKSSQSLLYSSNQKNYFAWYQQKPGQPPKLLIYWAS |
| | | | TRESGVPDRFSGSGSGTDFTLTISSLQAEDVAVYYCQQYYSYPYTFGQG |
| | | | TKLEIKSGGGGSEVQLVESGGGLVQPGGSLKLSCAASGFTFNKYAMNWV |
| | | | RQAPGKGLEWVARIRSKYNNYATYYADSVKDRFTISRDDSKNTAYLQMN |
| | | | NLKTEDTAVYYCVRHGNFGNSYISYWAYWGQGTLVTVSSGGGGSGGGGS |
| | | | GGGGSQTVVTQEPSLTVSPGGTVTLTCGSSTGAVTSGNYPNWVQQKPGQ |
| | | | APRGLIGGTKFLAPGTPARFSGSLLGGKAALTLSGVQPEDEAEYYCVLW |
| | | | YSNRWVFGGGTKLTVLGGGGDKTHTCPPCPAPELLGGPSVFLFPPKPKD |
| | | | TLMISRTPEVTCVVVDVSHEDPEVKFNWYVDGVEVHNAKTKPCEEQYGS |
| | | | TYRCVSVLTVLHQDWLNGKEYKCKVSNKALPAPIEKTISKAKGQPREPQ |
| | | | VYTLPPSREEMTKNQVSLTCLVKGFYPSDIAVEWESNGQPENNYKTTPP |
| | | | VLDSDGSFFLYSKLTVDKSRWQQGNVFSCSVMHEALHNHYTQKSLSLSP |
| | | | GKGGGGSGGGGSGGGGSGGGGSGGGGSGGGGSDKTHTCPPCPAPELLGG |
| | | | PSVFLFPPKPKDTLMISRTPEVTCVVVDVSHEDPEVKENWYVDGVEVHN |
| | | | AKTKPCEEQYGSTYRCVSVLTVLHQDWLNGKEYKCKVSNKALPAPIEKT |
| | | | ISKAKGQPREPQVYTLPPSREEMTKNQVSLTCLVKGFYPSDIAVEWESN |
| | | | GQPENNYKTTPPVLDSDGSFFLYSKLTVDKSRWQQGNVFSCSVMHEALH |
| | | | NHYTQKSLSLSPGK |
| 805 | CH3_G8A_6- | artificial | EVQLLESGGGLVQPGGSLRLSCAASGFSFSSYPINWVRQAPGKGLEWVG |
| | B12_x_I2C_x_scFc_ | | VIWTGGGTNYASSVKGRFTISRDNSKNTVYLQMNSLRAEDTAVYYCAKS |
| | clipopt | | RGVYDFDGRGAMDYWGQGTLVTVSSGGGGQGGGGQGGGGQEIVMTQSPD |
| | | | SLAVSLGERATINCKSSQSLLYSSNQKNYFAWYQQKPGQPPKLLIYWAS |
| | | | TRESGVPDRFSGSGSGTDFTLTISSLQAEDVAVYYCQQYYSYPYTFGQG |
| | | | TKLEIKGGGGCPPCPAPELLGGPSVFLFPPKPKDTLMISRTPEVTCVVV |
| | | | DVSHEEPEVKFNWYVDGVEVHNAKTKPCEEQYGSTYRCVSVLTVLHQDW |
| | | | LNGKEYKCKVSNKALPAPIEKTISKAKGQPREPQVYTLPPSREEMTKNQ |
| | | | VSLTCLVKGFYPSDIAVEWESNGQPENNYKTTPPVLDSDGSFFLYSKLT |
| | | | VDKSRWQQGNVFSCSVMHEALHNHYTQKSLSLSPGKGGGGQGGGGQGGG |
| | | | GQGGGGQGGGGQGGGGQCPPCPAPELLGGPSVFLFPPKPKDTLMISRTP |
| | | | EVTCVVVDVSHEEPEVKFNWYVDGVEVHNAKTKPCEEQYGSTYRCVSVL |
| | | | TVLHQDWLNGKEYKCKVSNKALPAPIEKTISKAKGQPREPQVYTLPPSR |
| | | | EEMTKNQVSLTCLVKGFYPSDIAVEWESNGQPENNYKTTPPVLDSDGSF |
| | | | FLYSKLTVDKSRWQQGNVFSCSVMHEALHNHYTQKSLSLSPGK |
| 806 | CL1_7-D7_CC_x_I2C0- | artificial | QVQLVQSGAEVKKPGASVKVSCKASGYTFTNYYMHWVRQAPGQCLEWMG |
| | scFc_clipopt | | WINPTSGGANYAQKFQGRVTMTRDTSISTAYMELSRLRSDDTAVYFCAR |
| | | | ESHAIQEGIWFDYWGQGTLVTVSSGGGGQGGGGQGGGGQEIQMTQSPSS |
| | | | LSASVGDRVTISCRASQSISNYLNWYQQKPGKAPKLLIYDASSLQSGVP |
| | | | SRFSGSGSGTDFTLTISSLQPEDFATYYCQQSYSFPLTFGCGTKVEIKS |
| | | | GGGGQEVQLVESGGGLVQPGGSLKLSCAASGFTFNKYAMNWVRQAPGKG |
| | | | LEWVARIRSKYNNYATYYADSVKDRFTISRDDSKNTAYLQMNNLKTEDT |
| | | | AVYYCVRHGNFGNSYISYWAYWGQGTLVTVSSGGGGQGGGGQGGGGQQT |
| | | | VVTQEPSLTVSPGGTVTLTCGSSTGAVTSGNYPNWVQQKPGQAPRGLIG |
| | | | GTKFLAPGTPARFSGSLLGGKAALTLSGVQPEDEAEYYCVLWYSNRWVF |
| | | | GGGTKLTVLGGGGCPPCPAPELLGGPSVFLFPPKPKDTLMISRTPEVTC |
| | | | VVVDVSHEEPEVKFNWYVDGVEVHNAKTKPCEEQYGSTYRCVSVLTVLH |
| | | | QDWLNGKEYKCKVSNKALPAPIEKTISKAKGQPREPQVYTLPPSREEMT |
| | | | KNQVSLTCLVKGFYPSDIAVEWESNGQPENNYKTTPPVLDSDGSFFLYS |
| | | | KLTVDKSRWQQGNVFSCSVMHEALHNHYTQKSLSLSPGKGGGGQGGGGQ |
| | | | GGGGQGGGGQGGGGQGGGGQCPPCPAPELLGGPSVFLFPPKPKDTLMIS |
| | | | RTPEVTCVVVDVSHEEPEVKFNWYVDGVEVHNAKTKPCEEQYGSTYRCV |
| | | | SVLTVLHQDWLNGKEYKCKVSNKALPAPIEKTISKAKGQPREPQVYTLP |
| | | | PSREEMTKNQVSLTCLVKGFYPSDIAVEWESNGQPENNYKTTPPVLDSD |
| | | | GSFFLYSKLTVDKSRWQQGNVFSCSVMHEALHNHYTQKSLSLSPGK |
| 807 | CL1_7- | artificial | QVQLVQSGAEVKKPGASVKVSCKASGYTFTNYYMHWVRQAPGQCLEWMG |
| | D7_CC_x_I2C0_x_scFc | | WINPTSGGANYAQKFQGRVTMTRDTSISTAYMELSRLRSDDTAVYFCAR |
| | | | ESHAIQEGIWFDYWGQGTLVTVSSGGGGSGGGGSGGGGSDIQMTQSPSS |
| | | | LSASVGDRVTISCRASQSISNYLNWYQQKPGKAPKLLIYDASSLQSGVP |
| | | | SRFSGSGSGTDFTLTISSLQPEDFATYYCQQSYSFPLTFGCGTKVEIKS |
| | | | GGGGSEVQLVESGGGLVQPGGSLKLSCAASGFTFNKYAMNWVRQAPGKG |
| | | | LEWVARIRSKYNNYATYYADSVKDRFTISRDDSKNTAYLQMNNLKTEDT |
| | | | AVYYCVRHGNFGNSYISYWAYWGQGTLVTVSSGGGGSGGGGSGGGGSQT |
| | | | VVTQEPSLTVSPGGTVTLTCGSSTGAVTSGNYPNWVQQKPGQAPRGLIG |
| | | | GTKFLAPGTPARFSGSLLGGKAALTLSGVQPEDEAEYYCVLWYSNRWVF |
| | | | GGGTKLTVLGGGGDKTHTCPPCPAPELLGGPSVFLFPPKPKDTLMISRT |
| | | | PEVTCVVVDVSHEDPEVKFNWYVDGVEVHNAKTKPCEEQYGSTYRCVSV |
| | | | LTVLHQDWLNGKEYKCKVSNKALPAPIEKTISKAKGQPREPQVYTLPPS |
| | | | REEMTKNQVSLTCLVKGFYPSDIAVEWESNGQPENNYKTTPPVLDSDGS |
| | | | FFLYSKLTVDKSRWQQGNVFSCSVMHEALHNHYTQKSLSLSPGKGGGGS |
| | | | GGGGSGGGGSGGGGSGGGGSGGGGSDKTHTCPPCPAPELLGGPSVFLFP |
| | | | PKPKDTLMISRTPEVTCVVVDVSHEDPEVKFNWYVDGVEVHNAKTKPCE |
| | | | EQYGSTYRCVSVLTVLHQDWLNGKEYKCKVSNKALPAPIEKTISKAKGQ |
| | | | PREPQVYTLPPSREEMTKNQVSLTCLVKGFYPSDIAVEWESNGQPENNY |
| | | | KTTPPVLDSDGSFFLYSKLTVDKSRWQQGNVFSCSVMHEALHNHYTQKS |
| | | | LSLSPGK |
| 808 | CL6_3D4-01- | artificial | EIVLTQSPGTLSLSPGERATLSCRASQSVSSSYLAWYQQKPGQAPRLLI |
| | G2_LH_x_I2C_x_scFc | | YGASSRATGIPDRFSGSGSGTDFTLTISRLEPEDFAVYYCQQYGSSPLT |
| | | | FGCGTKLEIKGGGGSGGGGSGGGGSQVQLVQSGAEVKKPGASVKVSCKA |
| | | | SGYTFTGYYMHWVRQAPGQCLEWMGWINPNSGETNYAQKFQGRVTMTRD |
| | | | TSISTAYMELSRLRSDDTAVYYCARDALIVVAPVTRDYYYYGMDVWGQG |
| | | | TTVTVSSSGGGGSEVQLVESGGGLVQPGGSLKLSCAASGFTENKYAMNW |
| | | | VRQAPGKGLEWVARIRSKYNNYATYYADSVKDRFTISRDDSKNTAYLQM |
| | | | NNLKTEDTAVYYCVRHGNFGNSYISYWAYWGQGTLVTVSSGGGGSGGGG |
| | | | SGGGGSQTVVTQEPSLTVSPGGTVTLTCGSSTGAVTSGNYPNWVQQKPG |
| | | | QAPRGLIGGTKFLAPGTPARFSGSLLGGKAALTLSGVQPEDEAEYYCVL |
| | | | WYSNRWVFGGGTKLTVLGGGGDKTHTCPPCPAPELLGGPSVFLFPPKPK |
| | | | DTLMISRTPEVTCVVVDVSHEDPEVKFNWYVDGVEVHNAKTKPCEEQYG |
| | | | STYRCVSVLTVLHQDWLNGKEYKCKVSNKALPAPIEKTISKAKGQPREP |
| | | | QVYTLPPSREEMTKNQVSLTCLVKGFYPSDIAVEWESNGQPENNYKTTP |
| | | | PVLDSDGSFFLYSKLTVDKSRWQQGNVFSCSVMHEALHNHYTQKSLSLS |
| | | | PGKGGGGSGGGGSGGGGSGGGGSGGGGSGGGGSDKTHTCPPCPAPELLG |
| | | | GPSVFLFPPKPKDTLMISRTPEVTCVVVDVSHEDPEVKFNWYVDGVEVH |
| | | | NAKTKPCEEQYGSTYRCVSVLTVLHQDWLNGKEYKCKVSNKALPAPIEK |
| | | | TISKAKGQPREPQVYTLPPSREEMTKNQVSLTCLVKGFYPSDIAVEWES |
| | | | NGQPENNYKTTPPVLDSDGSFFLYSKLTVDKSRWQQGNVFSCSVMHEAL |
| | | | HNHYTQKSLSLSPGK |
| 809 | CL6_3D4- | artificial | EIVLTQSPGTLSLSPGERATLSCRASQSVSSSYLAWYQQKPGQAPRLLI |
| | 01.G2_LH_x_I2C_x_ | | YGASSRATGIPDRFSGSGSGTDFTLTISRLEPEDFAVYYCQQYGSSPLT |
| | scFc-S | | FGCGTKLEIKGGGGSGGGGSGGGGSQVQLVQSGAEVKKPGASVKVSCKA |
| | | | SGYTFTGYYMHWVRQAPGQCLEWMGWINPNSGETNYAQKFQGRVTMTRD |
| | | | TSISTAYMELSRLRSDDTAVYYCARDALIVVAPVTRDYYYYGMDVWGQG |
| | | | TTVTVSSGGGGSEVQLVESGGGLVQPGGSLKLSCAASGFTENKYAMNWV |
| | | | RQAPGKGLEWVARIRSKYNNYATYYADSVKDRFTISRDDSKNTAYLQMN |
| | | | NLKTEDTAVYYCVRHGNFGNSYISYWAYWGQGTLVTVSSGGGGSGGGGS |
| | | | GGGGSQTVVTQEPSLTVSPGGTVTLTCGSSTGAVTSGNYPNWVQQKPGQ |
| | | | APRGLIGGTKFLAPGTPARFSGSLLGGKAALTLSGVQPEDEAEYYCVLW |
| | | | YSNRWVFGGGTKLTVLGGGGDKTHTCPPCPAPELLGGPSVFLFPPKPKD |
| | | | TLMISRTPEVTCVVVDVSHEDPEVKENWYVDGVEVHNAKTKPCEEQYGS |
| | | | TYRCVSVLTVLHQDWLNGKEYKCKVSNKALPAPIEKTISKAKGQPREPQ |
| | | | VYTLPPSREEMTKNQVSLTCLVKGFYPSDIAVEWESNGQPENNYKTTPP |
| | | | VLDSDGSFFLYSKLTVDKSRWQQGNVFSCSVMHEALHNHYTQKSLSLSP |
| | | | GKGGGGSGGGGSGGGGSGGGGSGGGGSGGGGSDKTHTCPPCPAPELLGG |
| | | | PSVFLFPPKPKDTLMISRTPEVTCVVVDVSHEDPEVKENWYVDGVEVHN |
| | | | AKTKPCEEQYGSTYRCVSVLTVLHQDWLNGKEYKCKVSNKALPAPIEKT |
| | | | ISKAKGQPREPQVYTLPPSREEMTKNQVSLTCLVKGFYPSDIAVEWESN |
| | | | GQPENNYKTTPPVLDSDGSFFLYSKLTVDKSRWQQGNVFSCSVMHEALH |
| | | | NHYTQKSLSLSPGK |
| 810 | CL6_3D4- | artificial | EIVLTQSPGTLSLSPGERATLSCRASQSVSSSYLAWYQQKPGQAPRLLI |
| | 01.G2_LH_x_I2C_x_ | | YGASSRATGIPDRFSGSGSGTDFTLTISRLEPEDFAVYYCQQYGSSPLT |
| | scFc_clipopt | | FGCGTKLEIKGGGGQGGGGQGGGGQQVQLVQSGAEVKKPGASVKVSCKA |
| | | | SGYTFTGYYMHWVRQAPGQCLEWMGWINPNSGETNYAQKFQGRVTMTRD |
| | | | TSISTAYMELSRLRSDDTAVYYCARDALIVVAPVTRDYYYYGMDVWGQG |
| | | | TTVTVSSGGGGQEVQLVESGGGLVQPGGSLKLSCAASGFTENKYAMNWV |
| | | | RQAPGKGLEWVARIRSKYNNYATYYADSVKDRFTISRDDSKNTAYLQMN |
| | | | NLKTEDTAVYYCVRHGNFGNSYISYWAYWGQGTLVTVSSGGGGQGGGGQ |
| | | | GGGGQQTVVTQEPSLTVSPGGTVTLTCGSSTGAVTSGNYPNWVQQKPGQ |
| | | | APRGLIGGTKFLAPGTPARFSGSLLGGKAALTLSGVQPEDEAEYYCVLW |
| | | | YSNRWVFGGGTKLTVLGGGGCPPCPAPELLGGPSVFLFPPKPKDTLMIS |
| | | | RTPEVTCVVVDVSHEEPEVKFNWYVDGVEVHNAKTKPCEEQYGSTYRCV |
| | | | SVLTVLHQDWLNGKEYKCKVSNKALPAPIEKTISKAKGQPREPQVYTLP |
| | | | PSREEMTKNQVSLTCLVKGFYPSDIAVEWESNGQPENNYKTTPPVLDSD |
| | | | GSFFLYSKLTVDKSRWQQGNVFSCSVMHEALHNHYTQKSLSLSPGKGGG |
| | | | GQGGGGQGGGGQGGGGQGGGGQGGGGQCPPCPAPELLGGPSVFLFPPKP |
| | | | KDTLMISRTPEVTCVVVDVSHEEPEVKFNWYVDGVEVHNAKTKPCEEQY |
| | | | GSTYRCVSVLTVLHQDWLNGKEYKCKVSNKALPAPIEKTISKAKGQPRE |
| | | | PQVYTLPPSREEMTKNQVSLTCLVKGFYPSDIAVEWESNGQPENNYKTT |
| | | | PPVLDSDGSFFLYSKLTVDKSRWQQGNVFSCSVMHEALHNHYTQKSLSL |
| | | | SPGK |
| 811 | CL_10D8_CC_x_I2C_x_ | artificial | QVQLVQSGAEVKKPGASVKVSCKASGYTFTGYYMHWVRQAPGQCLEWMG |
| | scFc | | WINPNSGGTKYAQKFQGRVTMTRDTSISTAYMELSRLRSDDTAVYYCAR |
| | | | DRITVAGTYYYYGMDVWGQGTTVTVSSGGGGSGGGGSGGGGSDIQMTQS |
| | | | PSSVSASVGDRVTITCRASQGVNNWLAWYQQKPGKAPKLLIYTASSLQS |
| | | | GVPSRFSGSGSGTDFTLTIRSLQPEDFATYYCQQANSFPITFGCGTRLE |
| | | | IKSGGGGSEVQLVESGGGLVQPGGSLKLSCAASGFTFNKYAMNWVRQAP |
| | | | GKGLEWVARIRSKYNNYATYYADSVKDRFTISRDDSKNTAYLQMNNLKT |
| | | | EDTAVYYCVRHGNFGNSYISYWAYWGQGTLVTVSSGGGGSGGGGSGGGG |
| | | | SQTVVTQEPSLTVSPGGTVTLTCGSSTGAVTSGNYPNWVQQKPGQAPRG |
| | | | LIGGTKFLAPGTPARFSGSLLGGKAALTLSGVQPEDEAEYYCVLWYSNR |
| | | | WVFGGGTKLTVLGGGGDKTHTCPPCPAPELLGGPSVFLFPPKPKDTLMI |
| | | | SRTPEVTCVVVDVSHEDPEVKFNWYVDGVEVHNAKTKPCEEQYGSTYRC |
| | | | VSVLTVLHQDWLNGKEYKCKVSNKALPAPIEKTISKAKGQPREPQVYTL |
| | | | PPSREEMTKNQVSLTCLVKGFYPSDIAVEWESNGQPENNYKTTPPVLDS |
| | | | DGSFFLYSKLTVDKSRWQQGNVFSCSVMHEALHNHYTQKSLSLSPGKGG |
| | | | GGSGGGGSGGGGSGGGGSGGGGSGGGGSDKTHTCPPCPAPELLGGPSVF |
| | | | LFPPKPKDTLMISRTPEVTCVVVDVSHEDPEVKENWYVDGVEVHNAKTK |
| | | | PCEEQYGSTYRCVSVLTVLHQDWLNGKEYKCKVSNKALPAPIEKTISKA |
| | | | KGQPREPQVYTLPPSREEMTKNQVSLTCLVKGFYPSDIAVEWESNGQPE |
| | | | NNYKTTPPVLDSDGSFFLYSKLTVDKSRWQQGNVFSCSVMHEALHNHYT |
| | | | QKSLSLSPGK |
| 812 | CL_10D8_CC_x_I2C_x_ | artificial | QVQLVQSGAEVKKPGASVKVSCKASGYTFTGYYMHWVRQAPGQCLEWMG |
| | scFc_clipopt | | WINPNSGGTKYAQKFQGRVTMTRDTSISTAYMELSRLRSDDTAVYYCAR |
| | | | DRITVAGTYYYYGMDVWGQGTTVTVSSGGGGQGGGGQGGGGQEIQMTQS |
| | | | PSSVSASVGDRVTITCRASQGVNNWLAWYQQKPGKAPKLLIYTASSLQS |
| | | | GVPSRFSGSGSGTDFTLTIRSLQPEDFATYYCQQANSFPITFGCGTRLE |
| | | | IKSGGGGQEVQLVESGGGLVQPGGSLKLSCAASGFTFNKYAMNWVRQAP |
| | | | GKGLEWVARIRSKYNNYATYYADSVKDRFTISRDDSKNTAYLQMNNLKT |
| | | | EDTAVYYCVRHGNFGNSYISYWAYWGQGTLVTVSSGGGGQGGGGQGGGG |
| | | | QQTVVTQEPSLTVSPGGTVTLTCGSSTGAVTSGNYPNWVQQKPGQAPRG |
| | | | LIGGTKFLAPGTPARFSGSLLGGKAALTLSGVQPEDEAEYYCVLWYSNR |
| | | | WVFGGGTKLTVLGGGGCPPCPAPELLGGPSVFLFPPKPKDTLMISRTPE |
| | | | VTCVVVDVSHEEPEVKFNWYVDGVEVHNAKTKPCEEQYGSTYRCVSVLT |
| | | | VLHQDWLNGKEYKCKVSNKALPAPIEKTISKAKGQPREPQVYTLPPSRE |
| | | | EMTKNQVSLTCLVKGFYPSDIAVEWESNGQPENNYKTTPPVLDSDGSFF |
| | | | LYSKLTVDKSRWQQGNVFSCSVMHEALHNHYTQKSLSLSPGKGGGGQGG |
| | | | GGQGGGGQGGGGQGGGGQGGGGQCPPCPAPELLGGPSVFLFPPKPKDTL |
| | | | MISRTPEVTCVVVDVSHEEPEVKFNWYVDGVEVHNAKTKPCEEQYGSTY |
| | | | RCVSVLTVLHQDWLNGKEYKCKVSNKALPAPIEKTISKAKGQPREPQVY |
| | | | TLPPSREEMTKNQVSLTCLVKGFYPSDIAVEWESNGQPENNYKTTPPVL |
| | | | DSDGSFFLYSKLTVDKSRWQQGNVFSCSVMHEALHNHYTQKSLSLSPGK |
| 813 | DL_8- | artificial | QVQLQESGPGLVKPSETLSLTCTVSGGSISSYYWSWIRQPPGKCLEWIG |
| | A7_CC_x_I2C_x_scFc_ | | YVYYSGTTNYNPSLKSRVTISVDTSKNQFSLKLSSVTAADTAVYYCASI |
| | delGK | | AVTGFYFDYWGQGTLVTVSSGGGGSGGGGSGGGGSEIVLTQSPGTLSLS |
| | | | PGERVTLSCRASQRVNNNYLAWYQQRPGQAPRLLIYGASSRATGIPDRF |
| | | | SGSGSGTDFTLTISRLEPEDFAVYYCQQYDRSPLTFGCGTKLEIKSGGG |
| | | | GSEVQLVESGGGLVQPGGSLKLSCAASGFTFNKYAMNWVRQAPGKGLEW |
| | | | VARIRSKYNNYATYYADSVKDRFTISRDDSKNTAYLQMNNLKTEDTAVY |
| | | | YCVRHGNFGNSYISYWAYWGQGTLVTVSSGGGGSGGGGSGGGGSQTVVT |
| | | | QEPSLTVSPGGTVTLTCGSSTGAVTSGNYPNWVQQKPGQAPRGLIGGTK |
| | | | FLAPGTPARFSGSLLGGKAALTLSGVQPEDEAEYYCVLWYSNRWVFGGG |
| | | | TKLTVLGGGGDKTHTCPPCPAPELLGGPSVFLFPPKPKDTLMISRTPEV |
| | | | TCVVVDVSHEDPEVKENWYVDGVEVHNAKTKPCEEQYGSTYRCVSVLTV |
| | | | LHQDWLNGKEYKCKVSNKALPAPIEKTISKAKGQPREPQVYTLPPSREE |
| | | | MTKNQVSLTCLVKGFYPSDIAVEWESNGQPENNYKTTPPVLDSDGSFFL |
| | | | YSKLTVDKSRWQQGNVFSCSVMHEALHNHYTQKSLSLSPGGGGSGGGGS |
| | | | GGGGSGGGGSGGGGSGGGGSDKTHTCPPCPAPELLGGPSVFLFPPKPKD |
| | | | TLMISRTPEVTCVVVDVSHEDPEVKFNWYVDGVEVHNAKTKPCEEQYGS |
| | | | TYRCVSVLTVLHQDWLNGKEYKCKVSNKALPAPIEKTISKAKGQPREPQ |
| | | | VYTLPPSREEMTKNQVSLTCLVKGFYPSDIAVEWESNGQPENNYKTTPP |
| | | | VLDSDGSFFLYSKLTVDKSRWQQGNVFSCSVMHEALHNHYTQKSLSLSP |
| | | | GK |
| 814 | DL_8- | artificial | QVQLQESGPGLVKPSETLSLTCTVSGGSISSYYWSWIRQPPGKCLEWIG |
| | A7_CC_x_I2C_x_scFc_ | | YVYYSGTTNYNPSLKSRVTISVDTSKNQFSLKLSSVTAADTAVYYCASI |
| | delGK | | AVTGFYFDYWGQGTLVTVSSGGGGQGGGGQGGGGQEIVLTQSPGTLSLS |
| | | | PGERVTLSCRASQRVNNNYLAWYQQRPGQAPRLLIYGASSRATGIPDRF |
| | | | SGSGSGTDFTLTISRLEPEDFAVYYCQQYDRSPLTFGCGTKLEIKSGGG |
| | | | GQEVQLVESGGGLVQPGGSLKLSCAASGFTFNKYAMNWVRQAPGKGLEW |
| | | | VARIRSKYNNYATYYADSVKDRFTISRDDSKNTAYLQMNNLKTEDTAVY |
| | | | YCVRHGNFGNSYISYWAYWGQGTLVTVSSGGGGQGGGGQGGGGQQTVVT |
| | | | QEPSLTVSPGGTVTLTCGSSTGAVTSGNYPNWVQQKPGQAPRGLIGGTK |
| | | | FLAPGTPARFSGSLLGGKAALTLSGVQPEDEAEYYCVLWYSNRWVFGGG |
| | | | TKLTVLGGGGCPPCPAPELLGGPSVFLFPPKPKDTLMISRTPEVTCVVV |
| | | | DVSHEEPEVKFNWYVDGVEVHNAKTKPCEEQYGSTYRCVSVLTVLHQDW |
| | | | LNGKEYKCKVSNKALPAPIEKTISKAKGQPREPQVYTLPPSREEMTKNQ |
| | | | VSLTCLVKGFYPSDIAVEWESNGQPENNYKTTPPVLDSDGSFFLYSKLT |
| | | | VDKSRWQQGNVFSCSVMHEALHNHYTQKSLSLSPGGGGQGGGGQGGGGQ |
| | | | GGGGQGGGGQGGGGQCPPCPAPELLGGPSVFLFPPKPKDTLMISRTPEV |
| | | | TCVVVDVSHEEPEVKFNWYVDGVEVHNAKTKPCEEQYGSTYRCVSVLTV |
| | | | LHQDWLNGKEYKCKVSNKALPAPIEKTISKAKGQPREPQVYTLPPSREE |
| | | | MTKNQVSLTCLVKGFYPSDIAVEWESNGQPENNYKTTPPVLDSDGSFFL |
| | | | YSKLTVDKSRWQQGNVFSCSVMHEALHNHYTQKSLSLSPGK |
| 815 | F1D | artificial | QVQLVESGGGLVKPGESLRLSCAASGFTFSDYYMYWVRQAPGKCLEWVA |
| | | | IISDGGYYTYYSDIIKGRFTISRDNAKNSLYLQMNSLKAEDTAVYYCAR |
| | | | GFPLLRHGAMDYWGQGTLVTVSSGGGGQGGGGQGGGGQDIQMTQSPSSL |
| | | | SASVGDRVTITCKASQNVDTNVAWYQQKPGQAPKSLIYSASYVYWDVPS |
| | | | RFSGSASGTDFTLTISSVQSEDFATYYCQQYDQQLITFGCGTKLEIKSG |
| | | | GGGQEVQLVESGGGLVQPGGSLKLSCAASGFTFNKYAINWVRQAPGKGL |
| | | | EWVARIRSKYNNYATYYADAVKDRFTISRDDSKNTVYLQMNNLKTEDTA |
| | | | VYYCARAGNFGSSYISYWAYCGQGTLVTVSSGGGGQGGGGQGGGGQQTV |
| | | | VTQEPSLTVSPGGTVTITCGSSTGAVTSGNYPNWVQKKPGQCPRGLIGG |
| | | | TKFLAPGTPARFSGSLSGGKAALTLSGVQPEDEAEYYCVLWYSNRWVFG |
| | | | SGTKLTVLGGGGDKTHTCPPCPAPELLGGPSVFLFPPKPKDTLMISRTP |
| | | | EVTCVVVDVSHEDPEVKFNWYVDGVEVHNAKTKPCEEQYGSTYRCVSVL |
| | | | TVLHQDWLNGKEYKCKVSNKALPAPIEKTISKAKGQPREPQVYTLPPSR |
| | | | EEMTKNQVSLTCLVKGFYPSDIAVEWESNGQPENNYKTTPPVLDSDGSF |
| | | | FLYSKLTVDKSRWQQGNVFSCSVMHEALHNHYTQKSLSLSPGKGGGGQG |
| | | | GGGQGGGGQGGGGQGGGGQGGGGQDKTHTCPPCPAPELLGGPSVFLFPP |
| | | | KPKDTLMISRTPEVTCVVVDVSHEDPEVKENWYVDGVEVHNAKTKPCEE |
| | | | QYGSTYRCVSVLTVLHQDWLNGKEYKCKVSNKALPAPIEKTISKAKGQP |
| | | | REPQVYTLPPSREEMTKNQVSLTCLVKGFYPSDIAVEWESNGQPENNYK |
| | | | TTPPVLDSDGSFFLYSKLTVDKSRWQQGNVFSCSVMHEALHNHYTQKSL |
| | | | SLSPGK |
| 816 | F8I | artificial | QVQLVESGGGLVKPGESLRLSCAASGFTFSDYYMYWVRQAPGKCLEWVA |
| | | | IISDGGYYTYYSDIIKGRFTISRDNAKNSLYLQMNSLKAEDTAVYYCAR |
| | | | GFPLLRHGAMDYWGQGTLVTVSSGGGGQGGGGQGGGGQDIQMTQSPSSL |
| | | | SASVGDRVTITCKASQNVDTNVAWYQQKPGQAPKSLIYSASYVYWDVPS |
| | | | RFSGSASGTDFTLTISSVQSEDFATYYCQQYDQQLITFGCGTKLEIKSG |
| | | | GGGQEVQLVESGGGLVQPGGSLKLSCAASGFTFNKYAMNWVRQAPGKGL |
| | | | EWVARIRSKYNNYATYYADSVKDRFTISRDDSKNTAYLQMNNLKTEDTA |
| | | | VYYCVRHGNFGNSYISYWAYCGQGTLVTVSSGGGGQGGGGQGGGGQQTV |
| | | | VTQEPSLTVSPGGTVTLTCGSSTGAVTSGNYPNWVQQKPGQCPRGLIGG |
| | | | TKFLAPGTPARFSGSLLGGKAALTLSGVQPEDEAEYYCVLWYSNRWVFG |
| | | | GGTKLTVLGGGGDKTHTCPPCPAPELLGGPSVFLFPPKPKDTLMISRTP |
| | | | EVTCVVVDVSHEDPEVKFNWYVDGVEVHNAKTKPCEEQYGSTYRCVSVL |
| | | | TVLHQDWLNGKEYKCKVSNKALPAPIEKTISKAKGQPREPQVYTLPPSR |
| | | | EEMTKNQVSLTCLVKGFYPSDIAVEWESNGQPENNYKTTPPVLDSDGSF |
| | | | FLYSKLTVDKSRWQQGNVFSCSVMHEALHNHYTQKSLSLSPGKGGGGQG |
| | | | GGGQGGGGQGGGGQGGGGQGGGGQDKTHTCPPCPAPELLGGPSVFLFPP |
| | | | KPKDTLMISRTPEVTCVVVDVSHEDPEVKFNWYVDGVEVHNAKTKPCEE |
| | | | QYGSTYRCVSVLTVLHQDWLNGKEYKCKVSNKALPAPIEKTISKAKGQP |
| | | | REPQVYTLPPSREEMTKNQVSLTCLVKGFYPSDIAVEWESNGQPENNYK |
| | | | TTPPVLDSDGSFFLYSKLTVDKSRWQQGNVFSCSVMHEALHNHYTQKSL |
| | | | SLSPGK |
| 817 | FL_7- | artificial | QVTLKESGPTLVKPTETLTLTCTLSGFSLNNARMGVSWIRQPPGKCLEW |
| | A8_CC_x_I2C_x_scFc | | LAHIFSNDEKSYSTSLKNRLTISKDSSKTQVVLTMTNVDPVDTATYYCA |
| | | | RIVGYGSGWYGFFDYWGQGTLVTVSSGGGGSGGGGSGGGGSDIQMTQSP |
| | | | SSLSASVGDRVTITCRASQGIRNDLGWYQQKPGKAPKRLIYAASTLQSG |
| | | | VPSRFSGSGSGTEFTLTISSLQPEDFATYYCLQHNSYPLTFGCGTKVEI |
| | | | KSGGGGSEVQLVESGGGLVQPGGSLKLSCAASGFTFNKYAMNWVRQAPG |
| | | | KGLEWVARIRSKYNNYATYYADSVKDRFTISRDDSKNTAYLQMNNLKTE |
| | | | DTAVYYCVRHGNFGNSYISYWAYWGQGTLVTVSSGGGGSGGGGSGGGGS |
| | | | QTVVTQEPSLTVSPGGTVTLTCGSSTGAVTSGNYPNWVQQKPGQAPRGL |
| | | | IGGTKFLAPGTPARFSGSLLGGKAALTLSGVQPEDEAEYYCVLWYSNRW |
| | | | VFGGGTKLTVLGGGGDKTHTCPPCPAPELLGGPSVFLFPPKPKDTLMIS |
| | | | RTPEVTCVVVDVSHEDPEVKENWYVDGVEVHNAKTKPCEEQYGSTYRCV |
| | | | SVLTVLHQDWLNGKEYKCKVSNKALPAPIEKTISKAKGQPREPQVYTLP |
| | | | PSREEMTKNQVSLTCLVKGFYPSDIAVEWESNGQPENNYKTTPPVLDSD |
| | | | GSFFLYSKLTVDKSRWQQGNVFSCSVMHEALHNHYTQKSLSLSPGKGGG |
| | | | GSGGGGSGGGGSGGGGSGGGGSGGGGSDKTHTCPPCPAPELLGGPSVFL |
| | | | FPPKPKDTLMISRTPEVTCVVVDVSHEDPEVKFNWYVDGVEVHNAKTKP |
| | | | CEEQYGSTYRCVSVLTVLHQDWLNGKEYKCKVSNKALPAPIEKTISKAK |
| | | | GQPREPQVYTLPPSREEMTKNQVSLTCLVKGFYPSDIAVEWESNGQPEN |
| | | | NYKTTPPVLDSDGSFFLYSKLTVDKSRWQQGNVFSCSVMHEALHNHYTQ |
| | | | KSLSLSPGK |
| 818 | FL_7- | artificial | QVTLKESGPTLVKPTETLTLTCTLSGFSLNNARMGVSWIRQPPGKCLEW |
| | A8_CC_x_I2C_x_scFc_ | | LAHIFSNDEKSYSTSLKNRLTISKDSSKTQVVLTMTNVDPVDTATYYCA |
| | clipopt | | RIVGYGSGWYGFFDYWGQGTLVTVSSGGGGQGGGGQGGGGQEIQMTQSP |
| | | | SSLSASVGDRVTITCRASQGIRNDLGWYQQKPGKAPKRLIYAASTLQSG |
| | | | VPSRFSGSGSGTEFTLTISSLQPEDFATYYCLQHNSYPLTFGCGTKVEI |
| | | | KSGGGGQEVQLVESGGGLVQPGGSLKLSCAASGFTENKYAMNWVRQAPG |
| | | | KGLEWVARIRSKYNNYATYYADSVKDRFTISRDDSKNTAYLQMNNLKTE |
| | | | DTAVYYCVRHGNFGNSYISYWAYWGQGTLVTVSSGGGGQGGGGQGGGGQ |
| | | | QTVVTQEPSLTVSPGGTVTLTCGSSTGAVTSGNYPNWVQQKPGQAPRGL |
| | | | IGGTKFLAPGTPARFSGSLLGGKAALTLSGVQPEDEAEYYCVLWYSNRW |
| | | | VFGGGTKLTVLGGGGCPPCPAPELLGGPSVFLFPPKPKDTLMISRTPEV |
| | | | TCVVVDVSHEEPEVKFNWYVDGVEVHNAKTKPCEEQYGSTYRCVSVLTV |
| | | | LHQDWLNGKEYKCKVSNKALPAPIEKTISKAKGQPREPQVYTLPPSREE |
| | | | MTKNQVSLTCLVKGFYPSDIAVEWESNGQPENNYKTTPPVLDSDGSFFL |
| | | | YSKLTVDKSRWQQGNVFSCSVMHEALHNHYTQKSLSLSPGKGGGGQGGG |
| | | | GQGGGGQGGGGQGGGGQGGGGQCPPCPAPELLGGPSVFLFPPKPKDTLM |
| | | | ISRTPEVTCVVVDVSHEEPEVKFNWYVDGVEVHNAKTKPCEEQYGSTYR |
| | | | CVSVLTVLHQDWLNGKEYKCKVSNKALPAPIEKTISKAKGQPREPQVYT |
| | | | LPPSREEMTKNQVSLTCLVKGFYPSDIAVEWESNGQPENNYKTTPPVLD |
| | | | SDGSFFLYSKLTVDKSRWQQGNVFSCSVMHEALHNHYTQKSLSLSPGK |
| 819 | J1X | artificial | QVQLVQSGAEVKKPGESVKVSCKASGYTFTNYGMNWVKQAPGQCLEWMG |
| | | | WINTYTGEPTYADKFQGRVTMTTDTSTSTAYMEIRNLGGDDTAVYYCAR |
| | | | WSWSDGYYVYFDYWGQGTSVTVSSGGGGSGGGGSGGGGSDIVMTQSPDS |
| | | | LTVSLGERTTINCKSSQSVLDSSTNKNSLAWYQQKPGQPPKLLLSWAST |
| | | | RESGIPDRFSGSGSGTDFTLTIDSPQPEDSATYYCQQSAHFPITFGCGT |
| | | | RLEIKSGGGGSEVQLVESGGGLVQPGGSLKLSCAASGFTENKYAMNWVR |
| | | | QAPGKGLEWVARIRSKYNNYATYYADSVKDRFTISRDDSKNTAYLQMNN |
| | | | LKTEDTAVYYCVRHGNFGNSYISYWAYWGQGTLVTVSSGGGGSGGGGSG |
| | | | GGGSQTVVTQEPSLTVSPGGTVTLTCGSSTGAVTSGNYPNWVQQKPGQA |
| | | | PRGLIGGTKFLAPGTPARFSGSLLGGKAALTLSGVQPEDEAEYYCVLWY |
| | | | SNRWVFGGGTKLTVLGGGGCPPCPAPELLGGPSVFLFPPKPKDTLMISR |
| | | | TPEVTCVVVDVSHEEPEVKFNWYVDGVEVHNAKTKPCEEQYGSTYRCVS |
| | | | VLTVLHQDWLNGKEYKCKVSNKALPAPIEKTISKAKGQPREPQVYTLPP |
| | | | SREEMTKNQVSLTCLVKGFYPSDIAVEWESNGQPENNYKTTPPVLDSDG |
| | | | SFFLYSKLTVDKSRWQQGNVFSCSVMHEALHNHYTQKSLSLSPGKGGGG |
| | | | SGGGGSGGGGSGGGGSGGGGSGGGGSCPPCPAPELLGGPSVFLFPPKPK |
| | | | DTLMISRTPEVTCVVVDVSHEEPEVKFNWYVDGVEVHNAKTKPCEEQYG |
| | | | STYRCVSVLTVLHQDWLNGKEYKCKVSNKALPAPIEKTISKAKGQPREP |
| | | | QVYTLPPSREEMTKNQVSLTCLVKGFYPSDIAVEWESNGQPENNYKTTP |
| | | | PVLDSDGSFFLYSKLTVDKSRWQQGNVFSCSVMHEALHNHYTQKSLSLS |
| | | | PGK |
| 820 | M4T | artificial | QVQLVESGGGLVKPGESLRLSCAASGFTFSDYYMYWVRQAPGKCLEWVA |
| | | | IISDGGYYTYYSDIIKGRFTISRDNAKNSLYLQMNSLKAEDTAVYYCAR |
| | | | GFPLLRHGAMDYWGQGTLVTVSSGGGGQGGGGQGGGGQDIQMTQSPSSL |
| | | | SASVGDRVTITCKASQNVDTNVAWYQQKPGQAPKSLIYSASYVYWDVPS |
| | | | RFSGSASGTDFTLTISSVQSEDFATYYCQQYDQQLITFGCGTKLEIKSG |
| | | | GGGQEVQLVESGGGLVQPGGSLKLSCAASGFTFNKYAINWVRQAPGKGL |
| | | | EWVARIRSKYNNYATYYADAVKDRFTISRDDSKNTVYLQMNNLKTEDTA |
| | | | VYYCARAGNFGSSYISYWAYWGQGTLVTVSSGGGGQGGGGQGGGGQQTV |
| | | | VTQEPSLTVSPGGTVTITCGSSTGAVTSGNYPNWVQKKPGQAPRGLIGG |
| | | | TKFLAPGTPARFSGSLSGGKAALTLSGVQPEDEAEYYCVLWYSNRWVFG |
| | | | SGTKLTVLGGGGDKTHTCPPCPAPELLGGPSVFLFPPKPKDTLMISRTP |
| | | | EVTCVVVDVSHEDPEVKFNWYVDGVEVHNAKTKPCEEQYGSTYRCVSVL |
| | | | TVLHQDWLNGKEYKCKVSNKALPAPIEKTISKAKGQPREPQVYTLPPSR |
| | | | EEMTKNQVSLTCLVKGFYPSDIAVEWESNGQPENNYKTTPPVLDSDGSF |
| | | | FLYSKLTVDKSRWQQGNVFSCSVMHEALHNHYTQKSLSLSPGKGGGGQG |
| | | | GGGQGGGGQGGGGQGGGGQGGGGQDKTHTCPPCPAPELLGGPSVFLFPP |
| | | | KPKDTLMISRTPEVTCVVVDVSHEDPEVKENWYVDGVEVHNAKTKPCEE |
| | | | QYGSTYRCVSVLTVLHQDWLNGKEYKCKVSNKALPAPIEKTISKAKGQP |
| | | | REPQVYTLPPSREEMTKNQVSLTCLVKGFYPSDIAVEWESNGQPENNYK |
| | | | TTPPVLDSDGSFFLYSKLTVDKSRWQQGNVFSCSVMHEALHNHYTQKSL |
| | | | SLSPGK |
| 821 | M5J | artificial | QVQLVESGGGLVKPGESLRLSCAASGFTFSDYYMYWVRQAPGKCLEWVA |
| | | | IISDGGYYTYYSDIIKGRFTISRDNAKNSLYLQMNSLKAEDTAVYYCAR |
| | | | GFPLLRHGAMDYWGQGTLVTVSSGGGGQGGGGQGGGGQDIQMTQSPSSL |
| | | | SASVGDRVTITCKASQNVDTNVAWYQQKPGQAPKSLIYSASYVYWDVPS |
| | | | RFSGSASGTDFTLTISSVQSEDFATYYCQQYDQQLITFGCGTKLEIKSG |
| | | | GGGQEVQLVESGGGLVQPGGSLKLSCAASGFTENKYAMNWVRQAPGKGL |
| | | | EWVARIRSKYNNYATYYADSVKDRFTISRDDSKNTAYLQMNNLKTEDTA |
| | | | VYYCVRHGNFGNSYISYWAYCGQGTLVTVSSGGGGQGGGGQGGGGQQTV |
| | | | VTQEPSLTVSPGGTVTLTCGSSTGAVTSGNYPNWVQQKPGQCPRGLIGG |
| | | | TKFLAPGTPARFSGSLLGGKAALTLSGVQPEDEAEYYCVLWYSNRWVFG |
| | | | GGTKLTVLGGGGCPPCPAPELLGGPSVFLFPPKPKDTLMISRTPEVTCV |
| | | | VVDVSHEEPEVKFNWYVDGVEVHNAKTKPCEEQYGSTYRCVSVLTVLHQ |
| | | | DWLNGKEYKCKVSNKALPAPIEKTISKAKGQPREPQVYTLPPSREEMTK |
| | | | NQVSLTCLVKGFYPSDIAVEWESNGQPENNYKTTPPVLDSDGSFFLYSK |
| | | | LTVDKSRWQQGNVFSCSVMHEALHNHYTQKSLSLSPGKGGGGQGGGGQG |
| | | | GGGQGGGGQGGGGQGGGGQCPPCPAPELLGGPSVFLFPPKPKDTLMISR |
| | | | TPEVTCVVVDVSHEEPEVKENWYVDGVEVHNAKTKPCEEQYGSTYRCVS |
| | | | VLTVLHQDWLNGKEYKCKVSNKALPAPIEKTISKAKGQPREPQVYTLPP |
| | | | SREEMTKNQVSLTCLVKGFYPSDIAVEWESNGQPENNYKTTPPVLDSDG |
| | | | SFFLYSKLTVDKSRWQQGNVFSCSVMHEALHNHYTQKSLSLSPGK |
| 822 | MA_10- | artificial | EVQLVESGGGLVQPGGSLRLSCAASGFTFSNAWMSWVRQAPGKCLEWVG |
| | B5_CC_x_I2C_x_scFc | | RIRSRSYGGTTDYAAPVKGRFTISRDDSKNTLFLQMNSLKTEDTAVYYC |
| | | | TTPSYSGSYYNYFSVMDVWGQGTTVTVSSGGGGSGGGGSGGGGSDIQMT |
| | | | QSPSSLSASVGDRVTITCRTSQSISSYLNWYQQKPGRAPKLLIFAASSL |
| | | | QGGVPSRFSGSGSGTDFTLTISSLQPEDFATYYCQQTYSMPFTFGCGTK |
| | | | VEIKSGGGGSEVQLVESGGGLVQPGGSLKLSCAASGFTFNKYAMNWVRQ |
| | | | APGKGLEWVARIRSKYNNYATYYADSVKDRFTISRDDSKNTAYLQMNNL |
| | | | KTEDTAVYYCVRHGNFGNSYISYWAYWGQGTLVTVSSGGGGSGGGGSGG |
| | | | GGSQTVVTQEPSLTVSPGGTVTLTCGSSTGAVTSGNYPNWVQQKPGQAP |
| | | | RGLIGGTKFLAPGTPARFSGSLLGGKAALTLSGVQPEDEAEYYCVLWYS |
| | | | NRWVFGGGTKLTVLGGGGDKTHTCPPCPAPELLGGPSVFLFPPKPKDTL |
| | | | MISRTPEVTCVVVDVSHEDPEVKFNWYVDGVEVHNAKTKPCEEQYGSTY |
| | | | RCVSVLTVLHQDWLNGKEYKCKVSNKALPAPIEKTISKAKGQPREPQVY |
| | | | TLPPSREEMTKNQVSLTCLVKGFYPSDIAVEWESNGQPENNYKTTPPVL |
| | | | DSDGSFFLYSKLTVDKSRWQQGNVFSCSVMHEALHNHYTQKSLSLSPGK |
| | | | GGGGSGGGGSGGGGSGGGGSGGGGSGGGGSDKTHTCPPCPAPELLGGPS |
| | | | VFLFPPKPKDTLMISRTPEVTCVVVDVSHEDPEVKENWYVDGVEVHNAK |
| | | | TKPCEEQYGSTYRCVSVLTVLHQDWLNGKEYKCKVSNKALPAPIEKTIS |
| | | | KAKGQPREPQVYTLPPSREEMTKNQVSLTCLVKGFYPSDIAVEWESNGQ |
| | | | PENNYKTTPPVLDSDGSFFLYSKLTVDKSRWQQGNVFSCSVMHEALHNH |
| | | | YTQKSLSLSPGK |
| 823 | MA_10- | artificial | EVQLVESGGGLVQPGGSLRLSCAASGFTFSNAWMSWVRQAPGKCLEWVG |
| | B5_CC_x_I2C_x_scFc_ | | RIRSRSYGGTTDYAAPVKGRFTISRDDSKNTLFLQMNSLKTEDTAVYYC |
| | clipopt | | TTPSYSGSYYNYFSVMDVWGQGTTVTVSSGGGGQGGGGQGGGGQEIQMT |
| | | | QSPSSLSASVGDRVTITCRTSQSISSYLNWYQQKPGRAPKLLIFAASSL |
| | | | QGGVPSRFSGSGSGTDFTLTISSLQPEDFATYYCQQTYSMPFTFGCGTK |
| | | | VEIKSGGGGQEVQLVESGGGLVQPGGSLKLSCAASGFTFNKYAMNWVRQ |
| | | | APGKGLEWVARIRSKYNNYATYYADSVKDRFTISRDDSKNTAYLQMNNL |
| | | | KTEDTAVYYCVRHGNFGNSYISYWAYWGQGTLVTVSSGGGGQGGGGQGG |
| | | | GGQQTVVTQEPSLTVSPGGTVTLTCGSSTGAVTSGNYPNWVQQKPGQAP |
| | | | RGLIGGTKFLAPGTPARFSGSLLGGKAALTLSGVQPEDEAEYYCVLWYS |
| | | | NRWVFGGGTKLTVLGGGGCPPCPAPELLGGPSVFLFPPKPKDTLMISRT |
| | | | PEVTCVVVDVSHEEPEVKFNWYVDGVEVHNAKTKPCEEQYGSTYRCVSV |
| | | | LTVLHQDWLNGKEYKCKVSNKALPAPIEKTISKAKGQPREPQVYTLPPS |
| | | | REEMTKNQVSLTCLVKGFYPSDIAVEWESNGQPENNYKTTPPVLDSDGS |
| | | | FFLYSKLTVDKSRWQQGNVFSCSVMHEALHNHYTQKSLSLSPGKGGGGQ |
| | | | GGGGQGGGGQGGGGQGGGGQGGGGQCPPCPAPELLGGPSVFLFPPKPKD |
| | | | TLMISRTPEVTCVVVDVSHEEPEVKFNWYVDGVEVHNAKTKPCEEQYGS |
| | | | TYRCVSVLTVLHQDWLNGKEYKCKVSNKALPAPIEKTISKAKGQPREPQ |
| | | | VYTLPPSREEMTKNQVSLTCLVKGFYPSDIAVEWESNGQPENNYKTTPP |
| | | | VLDSDGSFFLYSKLTVDKSRWQQGNVFSCSVMHEALHNHYTQKSLSLSP |
| | | | GK |
| 824 | MA_3- | artificial | EVQLLESGGGLVQPGGSLRLSCAASGFTFSSYAMSWVRQAPGKCLEWVS |
| | G10_CC_x_I2C_x_scFc | | AISGSGGGTYYAASVKGRFTISRDNSKNTLYLQMSSLRAEDTAVYYCAT |
| | | | GKGVHLGFDYWGQGTLVTVSSGGGGSGGGGSGGGGSSYVLTQPPSVSVA |
| | | | PGQTARITCGGNNIGSKSVHWYQQKPGQAPVMVVYDDNDRPSGIPERFS |
| | | | GSNSGNTATLTISRVEAGDEADYYCQVWDYSGQRQVFGCGTKLTVLSGG |
| | | | GGSEVQLVESGGGLVQPGGSLKLSCAASGFTFNKYAMNWVRQAPGKGLE |
| | | | WVARIRSKYNNYATYYADSVKDRFTISRDDSKNTAYLQMNNLKTEDTAV |
| | | | YYCVRHGNFGNSYISYWAYWGQGTLVTVSSGGGGSGGGGSGGGGSQTVV |
| | | | TQEPSLTVSPGGTVTLTCGSSTGAVTSGNYPNWVQQKPGQAPRGLIGGT |
| | | | KFLAPGTPARFSGSLLGGKAALTLSGVQPEDEAEYYCVLWYSNRWVEGG |
| | | | GTKLTVLGGGGDKTHTCPPCPAPELLGGPSVFLFPPKPKDTLMISRTPE |
| | | | VTCVVVDVSHEDPEVKFNWYVDGVEVHNAKTKPCEEQYGSTYRCVSVLT |
| | | | VLHQDWLNGKEYKCKVSNKALPAPIEKTISKAKGQPREPQVYTLPPSRE |
| | | | EMTKNQVSLTCLVKGFYPSDIAVEWESNGQPENNYKTTPPVLDSDGSFF |
| | | | LYSKLTVDKSRWQQGNVFSCSVMHEALHNHYTQKSLSLSPGKGGGGSGG |
| | | | GGSGGGGSGGGGSGGGGSGGGGSDKTHTCPPCPAPELLGGPSVFLFPPK |
| | | | PKDTLMISRTPEVTCVVVDVSHEDPEVKENWYVDGVEVHNAKTKPCEEQ |
| | | | YGSTYRCVSVLTVLHQDWLNGKEYKCKVSNKALPAPIEKTISKAKGQPR |
| | | | EPQVYTLPPSREEMTKNQVSLTCLVKGFYPSDIAVEWESNGQPENNYKT |
| | | | TPPVLDSDGSFFLYSKLTVDKSRWQQGNVFSCSVMHEALHNHYTQKSLS |
| | | | LSPGK |
| 825 | MA_3- | artificial | EVQLLESGGGLVQPGGSLRLSCAASGFTFSSYAMSWVRQAPGKCLEWVS |
| | G10_CC_x_I2C_x_scFc_ | | AISGSGGGTYYAASVKGRFTISRDNSKNTLYLQMSSLRAEDTAVYYCAT |
| | clipopt | | GKGVHLGFDYWGQGTLVTVSSGGGGQGGGGQGGGGQSYVLTQPPSVSVA |
| | | | PGQTARITCGGNNIGSKSVHWYQQKPGQAPVMVVYDDNDRPSGIPERFS |
| | | | GSNSGNTATLTISRVEAGDEADYYCQVWDYSGQRQVFGCGTKLTVLSGG |
| | | | GGQEVQLVESGGGLVQPGGSLKLSCAASGFTFNKYAMNWVRQAPGKGLE |
| | | | WVARIRSKYNNYATYYADSVKDRFTISRDDSKNTAYLQMNNLKTEDTAV |
| | | | YYCVRHGNFGNSYISYWAYWGQGTLVTVSSGGGGQGGGGQGGGGQQTVV |
| | | | TQEPSLTVSPGGTVTLTCGSSTGAVTSGNYPNWVQQKPGQAPRGLIGGT |
| | | | KFLAPGTPARFSGSLLGGKAALTLSGVQPEDEAEYYCVLWYSNRWVEGG |
| | | | GTKLTVLGGGGCPPCPAPELLGGPSVFLFPPKPKDTLMISRTPEVTCVV |
| | | | VDVSHEEPEVKFNWYVDGVEVHNAKTKPCEEQYGSTYRCVSVLTVLHQD |
| | | | WLNGKEYKCKVSNKALPAPIEKTISKAKGQPREPQVYTLPPSREEMTKN |
| | | | QVSLTCLVKGFYPSDIAVEWESNGQPENNYKTTPPVLDSDGSFFLYSKL |
| | | | TVDKSRWQQGNVFSCSVMHEALHNHYTQKSLSLSPGKGGGGQGGGGQGG |
| | | | GGQGGGGQGGGGQGGGGQCPPCPAPELLGGPSVFLFPPKPKDTLMISRT |
| | | | PEVTCVVVDVSHEEPEVKFNWYVDGVEVHNAKTKPCEEQYGSTYRCVSV |
| | | | LTVLHQDWLNGKEYKCKVSNKALPAPIEKTISKAKGQPREPQVYTLPPS |
| | | | REEMTKNQVSLTCLVKGFYPSDIAVEWESNGQPENNYKTTPPVLDSDGS |
| | | | FFLYSKLTVDKSRWQQGNVFSCSVMHEALHNHYTQKSLSLSPGK |
| 826 | MS_5- | artificial | QVQLVESGGGLVKPGGSLRLSCAASGFTFSDYYMTWIRQAPGKGLEWLS |
| | F11_x_I2C_x_scFc | | YISSSGSTIYYADSVKGRFTISRDNAKNSLFLQMNSLRAEDTAVYYCAR |
| | | | DRNSHFDYWGQGTLVTVSSGGGGSGGGGSGGGGSDIQMTQSPSSVSASV |
| | | | GDRVTITCRASQGINTWLAWYQQKPGKAPKLLIYGASGLQSGVPSRFSG |
| | | | SGSGTDFTLTISSLQPEDFATYYCQQAKSFPRTFGQGTKVEIKSGGGGS |
| | | | EVQLVESGGGLVQPGGSLKLSCAASGFTENKYAMNWVRQAPGKGLEWVA |
| | | | RIRSKYNNYATYYADSVKDRFTISRDDSKNTAYLQMNNLKTEDTAVYYC |
| | | | VRHGNFGNSYISYWAYWGQGTLVTVSSGGGGSGGGGSGGGGSQTVVTQE |
| | | | PSLTVSPGGTVTLTCGSSTGAVTSGNYPNWVQQKPGQAPRGLIGGTKFL |
| | | | APGTPARFSGSLLGGKAALTLSGVQPEDEAEYYCVLWYSNRWVFGGGTK |
| | | | LTVLGGGGDKTHTCPPCPAPELLGGPSVFLFPPKPKDTLMISRTPEVTC |
| | | | VVVDVSHEDPEVKFNWYVDGVEVHNAKTKPCEEQYGSTYRCVSVLTVLH |
| | | | QDWLNGKEYKCKVSNKALPAPIEKTISKAKGQPREPQVYTLPPSREEMT |
| | | | KNQVSLTCLVKGFYPSDIAVEWESNGQPENNYKTTPPVLDSDGSFFLYS |
| | | | KLTVDKSRWQQGNVFSCSVMHEALHNHYTQKSLSLSPGKGGGGSGGGGS |
| | | | GGGGSGGGGSGGGGSGGGGSDKTHTCPPCPAPELLGGPSVFLFPPKPKD |
| | | | TLMISRTPEVTCVVVDVSHEDPEVKFNWYVDGVEVHNAKTKPCEEQYGS |
| | | | TYRCVSVLTVLHQDWLNGKEYKCKVSNKALPAPIEKTISKAKGQPREPQ |
| | | | VYTLPPSREEMTKNQVSLTCLVKGFYPSDIAVEWESNGQPENNYKTTPP |
| | | | VLDSDGSFFLYSKLTVDKSRWQQGNVFSCSVMHEALHNHYTQKSLSLSP |
| | | | GK |
| 827 | MS_5- | artificial | QVQLVESGGGLVKPGGSLRLSCAASGFTFSDYYMTWIRQAPGKGLEWLS |
| | F11_x_I2C_x_scFc_ | | YISSSGSTIYYADSVKGRFTISRDNAKNSLFLQMNSLRAEDTAVYYCAR |
| | clipopt | | DRNSHFDYWGQGTLVTVSSGGGGQGGGGQGGGGQEIQMTQSPSSVSASV |
| | | | GDRVTITCRASQGINTWLAWYQQKPGKAPKLLIYGASGLQSGVPSRFSG |
| | | | SGSGTDFTLTISSLQPEDFATYYCQQAKSFPRTFGQGTKVEIKSGGGGQ |
| | | | EVQLVESGGGLVQPGGSLKLSCAASGFTFNKYAMNWVRQAPGKGLEWVA |
| | | | RIRSKYNNYATYYADSVKDRFTISRDDSKNTAYLQMNNLKTEDTAVYYC |
| | | | VRHGNFGNSYISYWAYWGQGTLVTVSSGGGGQGGGGQGGGGQQTVVTQE |
| | | | PSLTVSPGGTVTLTCGSSTGAVTSGNYPNWVQQKPGQAPRGLIGGTKFL |
| | | | APGTPARFSGSLLGGKAALTLSGVQPEDEAEYYCVLWYSNRWVFGGGTK |
| | | | LTVLGGGGCPPCPAPELLGGPSVFLFPPKPKDTLMISRTPEVTCVVVDV |
| | | | SHEEPEVKFNWYVDGVEVHNAKTKPCEEQYGSTYRCVSVLTVLHQDWLN |
| | | | GKEYKCKVSNKALPAPIEKTISKAKGQPREPQVYTLPPSREEMTKNQVS |
| | | | LTCLVKGFYPSDIAVEWESNGQPENNYKTTPPVLDSDGSFFLYSKLTVD |
| | | | KSRWQQGNVFSCSVMHEALHNHYTQKSLSLSPGKGGGGQGGGGQGGGGQ |
| | | | GGGGQGGGGQGGGGQCPPCPAPELLGGPSVFLFPPKPKDTLMISRTPEV |
| | | | TCVVVDVSHEEPEVKFNWYVDGVEVHNAKTKPCEEQYGSTYRCVSVLTV |
| | | | LHQDWLNGKEYKCKVSNKALPAPIEKTISKAKGQPREPQVYTLPPSREE |
| | | | MTKNQVSLTCLVKGFYPSDIAVEWESNGQPENNYKTTPPVLDSDGSFFL |
| | | | YSKLTVDKSRWQQGNVFSCSVMHEALHNHYTQKSLSLSPGK |
| 828 | MU_8- | artificial | QVQLQQWGAGLLKPSETLSLTCAVYGGSFSGYYWSWIRQPPGKCLEWIG |
| | B7_CC_x_I2C_x_scFc | | DIDASGSTKYNPSLKSRVTISLDTSKNQFSLKLNSVTAADTAVYFCARK |
| | | | KYSTVWSYFDNWGQGTLVTVSSGGGGSGGGGSGGGGSSYELTQPSSVSV |
| | | | PPGQTASITCSGDKLGDKYASWYQQKPGQSPVLVIYQDRKRPSGVPERF |
| | | | SGSNSGNTATLTISGTQAMDEADYYCQAWGSSTAVFGCGTKLTVLSGGG |
| | | | GSEVQLVESGGGLVQPGGSLKLSCAASGFTFNKYAMNWVRQAPGKGLEW |
| | | | VARIRSKYNNYATYYADSVKDRFTISRDDSKNTAYLQMNNLKTEDTAVY |
| | | | YCVRHGNFGNSYISYWAYWGQGTLVTVSSGGGGSGGGGSGGGGSQTVVT |
| | | | QEPSLTVSPGGTVTLTCGSSTGAVTSGNYPNWVQQKPGQAPRGLIGGTK |
| | | | FLAPGTPARFSGSLLGGKAALTLSGVQPEDEAEYYCVLWYSNRWVFGGG |
| | | | TKLTVLGGGGDKTHTCPPCPAPELLGGPSVFLFPPKPKDTLMISRTPEV |
| | | | TCVVVDVSHEDPEVKFNWYVDGVEVHNAKTKPCEEQYGSTYRCVSVLTV |
| | | | LHQDWLNGKEYKCKVSNKALPAPIEKTISKAKGQPREPQVYTLPPSREE |
| | | | MTKNQVSLTCLVKGFYPSDIAVEWESNGQPENNYKTTPPVLDSDGSFFL |
| | | | YSKLTVDKSRWQQGNVFSCSVMHEALHNHYTQKSLSLSPGKGGGGSGGG |
| | | | GSGGGGSGGGGSGGGGSGGGGSDKTHTCPPCPAPELLGGPSVFLFPPKP |
| | | | KDTLMISRTPEVTCVVVDVSHEDPEVKFNWYVDGVEVHNAKTKPCEEQY |
| | | | GSTYRCVSVLTVLHQDWLNGKEYKCKVSNKALPAPIEKTISKAKGQPRE |
| | | | PQVYTLPPSREEMTKNQVSLTCLVKGFYPSDIAVEWESNGQPENNYKTT |
| | | | PPVLDSDGSFFLYSKLTVDKSRWQQGNVFSCSVMHEALHNHYTQKSLSL |
| | | | SPGK |
| 829 | MU_8- | artificial | QVQLQQWGAGLLKPSETLSLTCAVYGGSFSGYYWSWIRQPPGKCLEWIG |
| | B7_CC_x_I2C_x_scFc_ | | DIDASGSTKYNPSLKSRVTISLDTSKNQFSLKLNSVTAADTAVYFCARK |
| | clipopt | | KYSTVWSYFDNWGQGTLVTVSSGGGGQGGGGQGGGGQSYELTQPSSVSV |
| | | | PPGQTASITCSGDKLGDKYASWYQQKPGQSPVLVIYQDRKRPSGVPERF |
| | | | SGSNSGNTATLTISGTQAMDEADYYCQAWGSSTAVFGCGTKLTVLSGGG |
| | | | GQEVQLVESGGGLVQPGGSLKLSCAASGFTFNKYAMNWVRQAPGKGLEW |
| | | | VARIRSKYNNYATYYADSVKDRFTISRDDSKNTAYLQMNNLKTEDTAVY |
| | | | YCVRHGNFGNSYISYWAYWGQGTLVTVSSGGGGQGGGGQGGGGQQTVVT |
| | | | QEPSLTVSPGGTVTLTCGSSTGAVTSGNYPNWVQQKPGQAPRGLIGGTK |
| | | | FLAPGTPARFSGSLLGGKAALTLSGVQPEDEAEYYCVLWYSNRWVFGGG |
| | | | TKLTVLGGGGCPPCPAPELLGGPSVFLFPPKPKDTLMISRTPEVTCVVV |
| | | | DVSHEEPEVKFNWYVDGVEVHNAKTKPCEEQYGSTYRCVSVLTVLHQDW |
| | | | LNGKEYKCKVSNKALPAPIEKTISKAKGQPREPQVYTLPPSREEMTKNQ |
| | | | VSLTCLVKGFYPSDIAVEWESNGQPENNYKTTPPVLDSDGSFFLYSKLT |
| | | | VDKSRWQQGNVFSCSVMHEALHNHYTQKSLSLSPGKGGGGQGGGGQGGG |
| | | | GQGGGGQGGGGQGGGGQCPPCPAPELLGGPSVFLFPPKPKDTLMISRTP |
| | | | EVTCVVVDVSHEEPEVKENWYVDGVEVHNAKTKPCEEQYGSTYRCVSVL |
| | | | TVLHQDWLNGKEYKCKVSNKALPAPIEKTISKAKGQPREPQVYTLPPSR |
| | | | EEMTKNQVSLTCLVKGFYPSDIAVEWESNGQPENNYKTTPPVLDSDGSF |
| | | | FLYSKLTVDKSRWQQGNVFSCSVMHEALHNHYTQKSLSLSPGK |
| 830 | PM_76- | artificial | QVQLVESGGGLVKPGESLRLSCAASGFTFSDYYMYWVRQAPGKCLEWVA |
| | B10.11_CC_x_I2C_x_ | | IISDGGYYTYYSDIIKGRFTISRDNAKNSLYLQMNSLKAEDTAVYYCAR |
| | ScFc_/_11S | | GFPLLRHGAMDYWGQGTLVTVSSGGGGSGGGGSGGGGSDIQMTQSPSSL |
| | | | SASVGDRVTITCKASQNVDTNVAWYQQKPGQAPKSLIYSASYVYWDVPS |
| | | | RFSGSASGTDFTLTISSVQSEDFATYYCQQYDQQLITFGCGTKLEIKSG |
| | | | GGGSEVQLVESGGGLVQPGGSLKLSCAASGFTFNKYAMNWVRQAPGKGL |
| | | | EWVARIRSKYNNYATYYADSVKDRFTISRDDSKNTAYLQMNNLKTEDTA |
| | | | VYYCVRHGNFGNSYISYWAYWGQGTLVTVSSGGGGSGGGGSGGGGSQTV |
| | | | VTQEPSLTVSPGGTVTLTCGSSTGAVTSGNYPNWVQQKPGQAPRGLIGG |
| | | | TKFLAPGTPARFSGSLLGGKAALTLSGVQPEDEAEYYCVLWYSNRWVFG |
| | | | GGTKLTVLGGGGDKTHTCPPCPAPELLGGPSVFLFPPKPKDTLMISRTP |
| | | | EVTCVVVDVSHEDPEVKFNWYVDGVEVHNAKTKPCEEQYGSTYRCVSVL |
| | | | TVLHQDWLNGKEYKCKVSNKALPAPIEKTISKAKGQPREPQVYTLPPSR |
| | | | EEMTKNQVSLTCLVKGFYPSDIAVEWESNGQPENNYKTTPPVLDSDGSF |
| | | | FLYSKLTVDKSRWQQGNVFSCSVMHEALHNHYTQKSLSLSPGKGGGGSG |
| | | | GGGSGGGGSGGGGSGGGGSGGGGSDKTHTCPPCPAPELLGGPSVFLFPP |
| | | | KPKDTLMISRTPEVTCVVVDVSHEDPEVKFNWYVDGVEVHNAKTKPCEE |
| | | | QYGSTYRCVSVLTVLHQDWLNGKEYKCKVSNKALPAPIEKTISKAKGQP |
| | | | REPQVYTLPPSREEMTKNQVSLTCLVKGFYPSDIAVEWESNGQPENNYK |
| | | | TTPPVLDSDGSFFLYSKLTVDKSRWQQGNVFSCSVMHEALHNHYTQKSL |
| | | | SLSPGK |
| 831 | PM_76- | artificial | QVQLVESGGGLVKPGESLRLSCAASGFTFSDYYMYWVRQAPGKCLEWVA |
| | B10.11_CC_x_I2C_x_ | | IISDGGYYTYYSDIIKGRFTISRDNAKNSLYLQMNSLKAEDTAVYYCAR |
| | scFc_clipopt | | GFPLLRHGAMDYWGQGTLVTVSSGGGGQGGGGQGGGGQEIQMTQSPSSL |
| | | | SASVGDRVTITCKASQNVDTNVAWYQQKPGQAPKSLIYSASYVYWDVPS |
| | | | RFSGSASGTDFTLTISSVQSEDFATYYCQQYDQQLITFGCGTKLEIKSG |
| | | | GGGQEVQLVESGGGLVQPGGSLKLSCAASGFTFNKYAMNWVRQAPGKGL |
| | | | EWVARIRSKYNNYATYYADSVKDRFTISRDDSKNTAYLQMNNLKTEDTA |
| | | | VYYCVRHGNFGNSYISYWAYWGQGTLVTVSSGGGGQGGGGQGGGGQQTV |
| | | | VTQEPSLTVSPGGTVTLTCGSSTGAVTSGNYPNWVQQKPGQAPRGLIGG |
| | | | TKFLAPGTPARFSGSLLGGKAALTLSGVQPEDEAEYYCVLWYSNRWVFG |
| | | | GGTKLTVLGGGGCPPCPAPELLGGPSVFLFPPKPKDTLMISRTPEVTCV |
| | | | VVDVSHEEPEVKFNWYVDGVEVHNAKTKPCEEQYGSTYRCVSVLTVLHQ |
| | | | DWLNGKEYKCKVSNKALPAPIEKTISKAKGQPREPQVYTLPPSREEMTK |
| | | | NQVSLTCLVKGFYPSDIAVEWESNGQPENNYKTTPPVLDSDGSFFLYSK |
| | | | LTVDKSRWQQGNVFSCSVMHEALHNHYTQKSLSLSPGKGGGGQGGGGQG |
| | | | GGGQGGGGQGGGGQGGGGQCPPCPAPELLGGPSVFLFPPKPKDTLMISR |
| | | | TPEVTCVVVDVSHEEPEVKFNWYVDGVEVHNAKTKPCEEQYGSTYRCVS |
| | | | VLTVLHQDWLNGKEYKCKVSNKALPAPIEKTISKAKGQPREPQVYTLPP |
| | | | SREEMTKNQVSLTCLVKGFYPSDIAVEWESNGQPENNYKTTPPVLDSDG |
| | | | SFFLYSKLTVDKSRWQQGNVFSCSVMHEALHNHYTQKSLSLSPGK |
| 832 | Q6S | artificial | QVQLVQSGAEVKKPGESVKVSCKASGYTFTNYGMNWVKQAPGQCLEWMG |
| | | | WINTYTGEPTYADKFQGRVTMTTDTSTSTAYMEIRNLGGDDTAVYYCAR |
| | | | WSWSDGYYVYFDYWGQGTSVTVSSGGGGQGGGGQGGGGQDIVMTQSPDS |
| | | | LTVSLGERTTINCKSSQSVLDSSTNKNSLAWYQQKPGQPPKLLLSWAST |
| | | | RESGIPDRFSGSGSGTDFTLTIDSPQPEDSATYYCQQSAHFPITFGCGT |
| | | | RLEIKSGGGGQEVQLVESGGGLVQPGGSLKLSCAASGFTENKYAMNWVR |
| | | | QAPGKGLEWVARIRSKYNNYATYYADSVKDRFTISRDDSKNTAYLQMNN |
| | | | LKTEDTAVYYCVRHGNFGNSYISYWAYWGQGTLVTVSSGGGGQGGGGQG |
| | | | GGGQQTVVTQEPSLTVSPGGTVTLTCGSSTGAVTSGNYPNWVQQKPGQA |
| | | | PRGLIGGTKFLAPGTPARFSGSLLGGKAALTLSGVQPEDEAEYYCVLWY |
| | | | SNRWVFGGGTKLTVLGGGGDKTHTCPPCPAPELLGGPSVFLFPPKPKDT |
| | | | LMISRTPEVTCVVVDVSHEDPEVKENWYVDGVEVHNAKTKPCEEQYGST |
| | | | YRCVSVLTVLHQDWLNGKEYKCKVSNKALPAPIEKTISKAKGQPREPQV |
| | | | YTLPPSREEMTKNQVSLTCLVKGFYPSDIAVEWESNGQPENNYKTTPPV |
| | | | LDSDGSFFLYSKLTVDKSRWQQGNVFSCSVMHEALHNHYTQKSLSLSPG |
| | | | KGGGGQGGGGQGGGGQGGGGQGGGGQGGGGQDKTHTCPPCPAPELLGGP |
| | | | SVFLFPPKPKDTLMISRTPEVTCVVVDVSHEDPEVKENWYVDGVEVHNA |
| | | | KTKPCEEQYGSTYRCVSVLTVLHQDWLNGKEYKCKVSNKALPAPIEKTI |
| | | | SKAKGQPREPQVYTLPPSREEMTKNQVSLTCLVKGFYPSDIAVEWESNG |
| | | | QPENNYKTTPPVLDSDGSFFLYSKLTVDKSRWQQGNVFSCSVMHEALHN |
| | | | HYTQKSLSLSPGK |
| 833 | Q8I | artificial | QVQLVESGGGLVKPGESLRLSCAASGFTFSDYYMYWVRQAPGKCLEWVA |
| | | | IISDGGYYTYYSDIIKGRFTISRDNAKNSLYLQMNSLKAEDTAVYYCAR |
| | | | GFPLLRHGAMDYWGQGTLVTVSSGGGGQGGGGQGGGGQDIQMTQSPSSL |
| | | | SASVGDRVTITCKASQNVDTNVAWYQQKPGQAPKSLIYSASYVYWDVPS |
| | | | RFSGSASGTDFTLTISSVQSEDFATYYCQQYDQQLITFGCGTKLEIKSG |
| | | | GGGQEVQLVESGGGLVQPGGSLKLSCAASGFTFNKYAINWVRQAPGKGL |
| | | | EWVARIRSKYNNYATYYADAVKDRFTISRDDSKNTVYLQMNNLKTEDTA |
| | | | VYYCARAGNFGSSYISYWAYCGQGTLVTVSSGGGGQGGGGQGGGGQQTV |
| | | | VTQEPSLTVSPGGTVTITCGSSTGAVTSGNYPNWVQKKPGQCPRGLIGG |
| | | | TKFLAPGTPARFSGSLSGGKAALTLSGVQPEDEAEYYCVLWYSNRWVFG |
| | | | SGTKLTVLGGGGCPPCPAPELLGGPSVFLFPPKPKDTLMISRTPEVTCV |
| | | | VVDVSHEEPEVKFNWYVDGVEVHNAKTKPCEEQYGSTYRCVSVLTVLHQ |
| | | | DWLNGKEYKCKVSNKALPAPIEKTISKAKGQPREPQVYTLPPSREEMTK |
| | | | NQVSLTCLVKGFYPSDIAVEWESNGQPENNYKTTPPVLDSDGSFFLYSK |
| | | | LTVDKSRWQQGNVFSCSVMHEALHNHYTQKSLSLSPGKGGGGQGGGGQG |
| | | | GGGQGGGGQGGGGQGGGGQCPPCPAPELLGGPSVFLFPPKPKDTLMISR |
| | | | TPEVTCVVVDVSHEEPEVKFNWYVDGVEVHNAKTKPCEEQYGSTYRCVS |
| | | | VLTVLHQDWLNGKEYKCKVSNKALPAPIEKTISKAKGQPREPQVYTLPP |
| | | | SREEMTKNQVSLTCLVKGFYPSDIAVEWESNGQPENNYKTTPPVLDSDG |
| | | | SFFLYSKLTVDKSRWQQGNVFSCSVMHEALHNHYTQKSLSLSPGK |
| 834 | S5Z | artificial | QVQLVESGGGLVKPGESLRLSCAASGFTFSDYYMYWVRQAPGKCLEWVA |
| | | | IISDGGYYTYYSDIIKGRFTISRDNAKNSLYLQMNSLKAEDTAVYYCAR |
| | | | GFPLLRHGAMDYWGQGTLVTVSSGGGGQGGGGQGGGGQDIQMTQSPSSL |
| | | | SASVGDRVTITCKASQNVDTNVAWYQQKPGQAPKSLIYSASYVYWDVPS |
| | | | RFSGSASGTDFTLTISSVQSEDFATYYCQQYDQQLITFGCGTKLEIKSG |
| | | | GGGQEVQLVESGGGLVQPGGSLKLSCAASGFTENKYAINWVRQAPGKGL |
| | | | EWVARIRSKYNNYATYYADAVKDRFTISRDDSKNTVYLQMNNLKTEDTA |
| | | | VYYCARAGNFGSSYISYWAYWGQGTLVTVSSGGGGQGGGGQGGGGQQTV |
| | | | VTQEPSLTVSPGGTVTITCGSSTGAVTSGNYPNWVQKKPGQAPRGLIGG |
| | | | TKFLAPGTPARFSGSLSGGKAALTLSGVQPEDEAEYYCVLWYSNRWVFG |
| | | | SGTKLTVLGGGGCPPCPAPELLGGPSVFLFPPKPKDTLMISRTPEVTCV |
| | | | VVDVSHEEPEVKFNWYVDGVEVHNAKTKPCEEQYGSTYRCVSVLTVLHQ |
| | | | DWLNGKEYKCKVSNKALPAPIEKTISKAKGQPREPQVYTLPPSREEMTK |
| | | | NQVSLTCLVKGFYPSDIAVEWESNGQPENNYKTTPPVLDSDGSFFLYSK |
| | | | LTVDKSRWQQGNVFSCSVMHEALHNHYTQKSLSLSPGKGGGGQGGGGQG |
| | | | GGGQGGGGQGGGGQGGGGQCPPCPAPELLGGPSVFLFPPKPKDTLMISR |
| | | | TPEVTCVVVDVSHEEPEVKENWYVDGVEVHNAKTKPCEEQYGSTYRCVS |
| | | | VLTVLHQDWLNGKEYKCKVSNKALPAPIEKTISKAKGQPREPQVYTLPP |
| | | | SREEMTKNQVSLTCLVKGFYPSDIAVEWESNGQPENNYKTTPPVLDSDG |
| | | | SFFLYSKLTVDKSRWQQGNVFSCSVMHEALHNHYTQKSLSLSPGK |
| 835 | W7V | artificial | QVQLVQSGAEVKKPGESVKVSCKASGYTFTNYGMNWVKQAPGQCLEWMG |
| | | | WINTYTGEPTYADKFQGRVTMTTDTSTSTAYMEIRNLGGDDTAVYYCAR |
| | | | WSWSDGYYVYFDYWGQGTSVTVSSGGGGRGGGGRGGGGRDIVMTQSPDS |
| | | | LTVSLGERTTINCKSSQSVLDSSTNKNSLAWYQQKPGQPPKLLLSWAST |
| | | | RESGIPDRFSGSGSGTDFTLTIDSPQPEDSATYYCQQSAHFPITFGCGT |
| | | | RLEIKSGGGGREVQLVESGGGLVQPGGSLKLSCAASGFTENKYAMNWVR |
| | | | QAPGKGLEWVARIRSKYNNYATYYADSVKDRFTISRDDSKNTAYLQMNN |
| | | | LKTEDTAVYYCVRHGNFGNSYISYWAYWGQGTLVTVSSGGGGRGGGGRG |
| | | | GGGRQTVVTQEPSLTVSPGGTVTLTCGSSTGAVTSGNYPNWVQQKPGQA |
| | | | PRGLIGGTKFLAPGTPARFSGSLLGGKAALTLSGVQPEDEAEYYCVLWY |
| | | | SNRWVFGGGTKLTVLGGGGDKTHTCPPCPAPELLGGPSVFLFPPKPKDT |
| | | | LMISRTPEVTCVVVDVSHEDPEVKFNWYVDGVEVHNAKTKPCEEQYGST |
| | | | YRCVSVLTVLHQDWLNGKEYKCKVSNKALPAPIEKTISKAKGQPREPQV |
| | | | YTLPPSREEMTKNQVSLTCLVKGFYPSDIAVEWESNGQPENNYKTTPPV |
| | | | LDSDGSFFLYSKLTVDKSRWQQGNVFSCSVMHEALHNHYTQKSLSLSPG |
| | | | KGGGGRGGGGRGGGGRGGGGRGGGGRGGGGRDKTHTCPPCPAPELLGGP |
| | | | SVFLFPPKPKDTLMISRTPEVTCVVVDVSHEDPEVKENWYVDGVEVHNA |
| | | | KTKPCEEQYGSTYRCVSVLTVLHQDWLNGKEYKCKVSNKALPAPIEKTI |
| | | | SKAKGQPREPQVYTLPPSREEMTKNQVSLTCLVKGFYPSDIAVEWESNG |
| | | | QPENNYKTTPPVLDSDGSFFLYSKLTVDKSRWQQGNVFSCSVMHEALHN |
| | | | HYTQKSLSLSPGK |
| 836 | W8I | artificial | QVQLVQSGAEVKKPGESVKVSCKASGYTFTNYGMNWVKQAPGQCLEWMG |
| | | | WINTYTGEPTYADKFQGRVTMTTDTSTSTAYMEIRNLGGDDTAVYYCAR |
| | | | WSWSDGYYVYFDYWGQGTSVTVSSGGGGRGGGGRGGGGRDIVMTQSPDS |
| | | | LTVSLGERTTINCKSSQSVLDSSTNKNSLAWYQQKPGQPPKLLLSWAST |
| | | | RESGIPDRFSGSGSGTDFTLTIDSPQPEDSATYYCQQSAHFPITFGCGT |
| | | | RLEIKSGGGGREVQLVESGGGLVQPGGSLKLSCAASGFTENKYAMNWVR |
| | | | QAPGKGLEWVARIRSKYNNYATYYADSVKDRFTISRDDSKNTAYLQMNN |
| | | | LKTEDTAVYYCVRHGNFGNSYISYWAYWGQGTLVTVSSGGGGRGGGGRG |
| | | | GGGRQTVVTQEPSLTVSPGGTVTLTCGSSTGAVTSGNYPNWVQQKPGQA |
| | | | PRGLIGGTKFLAPGTPARFSGSLLGGKAALTLSGVQPEDEAEYYCVLWY |
| | | | SNRWVFGGGTKLTVLGGGGCPPCPAPELLGGPSVFLFPPKPKDTLMISR |
| | | | TPEVTCVVVDVSHEEPEVKFNWYVDGVEVHNAKTKPCEEQYGSTYRCVS |
| | | | VLTVLHQDWLNGKEYKCKVSNKALPAPIEKTISKAKGQPREPQVYTLPP |
| | | | SREEMTKNQVSLTCLVKGFYPSDIAVEWESNGQPENNYKTTPPVLDSDG |
| | | | SFFLYSKLTVDKSRWQQGNVFSCSVMHEALHNHYTQKSLSLSPGKGGGG |
| | | | RGGGGRGGGGRGGGGRGGGGRGGGGRCPPCPAPELLGGPSVFLFPPKPK |
| | | | DTLMISRTPEVTCVVVDVSHEEPEVKENWYVDGVEVHNAKTKPCEEQYG |
| | | | STYRCVSVLTVLHQDWLNGKEYKCKVSNKALPAPIEKTISKAKGQPREP |
| | | | QVYTLPPSREEMTKNQVSLTCLVKGFYPSDIAVEWESNGQPENNYKTTP |
| | | | PVLDSDGSFFLYSKLTVDKSRWQQGNVFSCSVMHEALHNHYTQKSLSLS |
| | | | PGK |
| 837 | X7D | artificial | QVQLVQSGAEVKKPGESVKVSCKASGYTFTNYGMNWVKQAPGQCLEWMG |
| | | | WINTYTGEPTYADKFQGRVTMTTDTSTSTAYMEIRNLGGDDTAVYYCAR |
| | | | WSWSDGYYVYFDYWGQGTSVTVSSGGGGQGGGGQGGGGQDIVMTQSPDS |
| | | | LTVSLGERTTINCKSSQSVLDSSTNKNSLAWYQQKPGQPPKLLLSWAST |
| | | | RESGIPDRFSGSGSGTDFTLTIDSPQPEDSATYYCQQSAHFPITFGCGT |
| | | | RLEIKSGGGGQEVQLVESGGGLVQPGGSLKLSCAASGFTFNKYAMNWVR |
| | | | QAPGKGLEWVARIRSKYNNYATYYADSVKDRFTISRDDSKNTAYLQMNN |
| | | | LKTEDTAVYYCVRHGNFGNSYISYWAYWGQGTLVTVSSGGGGQGGGGQG |
| | | | GGGQQTVVTQEPSLTVSPGGTVTLTCGSSTGAVTSGNYPNWVQQKPGQA |
| | | | PRGLIGGTKFLAPGTPARFSGSLLGGKAALTLSGVQPEDEAEYYCVLWY |
| | | | SNRWVFGGGTKLTVLGGGGCPPCPAPELLGGPSVFLFPPKPKDTLMISR |
| | | | TPEVTCVVVDVSHEEPEVKENWYVDGVEVHNAKTKPCEEQYGSTYRCVS |
| | | | VLTVLHQDWLNGKEYKCKVSNKALPAPIEKTISKAKGQPREPQVYTLPP |
| | | | SREEMTKNQVSLTCLVKGFYPSDIAVEWESNGQPENNYKTTPPVLDSDG |
| | | | SFFLYSKLTVDKSRWQQGNVFSCSVMHEALHNHYTQKSLSLSPGKGGGG |
| | | | QGGGGQGGGGQGGGGQGGGGQGGGGQCPPCPAPELLGGPSVFLFPPKPK |
| | | | DTLMISRTPEVTCVVVDVSHEEPEVKFNWYVDGVEVHNAKTKPCEEQYG |
| | | | STYRCVSVLTVLHQDWLNGKEYKCKVSNKALPAPIEKTISKAKGQPREP |
| | | | QVYTLPPSREEMTKNQVSLTCLVKGFYPSDIAVEWESNGQPENNYKTTP |
| | | | PVLDSDGSFFLYSKLTVDKSRWQQGNVFSCSVMHEALHNHYTQKSLSLS |
| | | | PGK |
| 838 | CS_PDL241.12_LH_CC_ | artificial | DIQMTQSPSSLSASVGDRVTITCKASQDVSTAVAWYQQKPGKAPKLLIY |
| | x_BC_A7_27-C4- | | SASYRYTGVPDRFTGSGSGTDFTLTISSLQPEDFATYYCQQHYSTPPYT |
| | G7_CC_x_I2C_x_scFc | | FGCGTKVEIKRGGGGSGGGGSGGGGSQVQLVQSGAEVKKPGASVKVSCK |
| | | | ASGYAFSSSWMNWVRQAPGQCLEWIGRIYPGDADAKYNAKFKGKATLTA |
| | | | DKSTSTAYMELSSLRSEDTAVYYCARSTMIATGAMDYWGQGTLVTVSSS |
| | | | GGGGSQVQLVQSGAEVKKPGASVKVSCKASGYTFTNHIIHWVRQAPGQC |
| | | | LEWMGYINPYPGYHAYNEKFQGRATMTSDTSTSTVYMELSSLRSEDTAV |
| | | | YYCARDGYYRDTDVLDYWGQGTLVTVSSGGGGSGGGGSGGGGSDIQMTQ |
| | | | SPSSLSASVGDRVTITCQASQDISNYLNWYQQKPGKAPKLLIYYTSRLH |
| | | | TGVPSRFSGSGSGTDFTFTISSLEPEDIATYYCQQGNTLPWTFGCGTKV |
| | | | EIKSGGGGSEVQLVESGGGLVQPGGSLKLSCAASGFTFNKYAMNWVRQA |
| | | | PGKGLEWVARIRSKYNNYATYYADSVKDRFTISRDDSKNTAYLQMNNLK |
| | | | TEDTAVYYCVRHGNFGNSYISYWAYWGQGTLVTVSSGGGGSGGGGSGGG |
| | | | GSQTVVTQEPSLTVSPGGTVTLTCGSSTGAVTSGNYPNWVQQKPGQAPR |
| | | | GLIGGTKFLAPGTPARFSGSLLGGKAALTLSGVQPEDEAEYYCVLWYSN |
| | | | RWVFGGGTKLTVLGGGGDKTHTCPPCPAPELLGGPSVFLFPPKPKDTLM |
| | | | ISRTPEVTCVVVDVSHEDPEVKFNWYVDGVEVHNAKTKPCEEQYGSTYR |
| | | | CVSVLTVLHQDWLNGKEYKCKVSNKALPAPIEKTISKAKGQPREPQVYT |
| | | | LPPSREEMTKNQVSLTCLVKGFYPSDIAVEWESNGQPENNYKTTPPVLD |
| | | | SDGSFFLYSKLTVDKSRWQQGNVFSCSVMHEALHNHYTQKSLSLSPGKG |
| | | | GGGSGGGGSGGGGSGGGGSGGGGSGGGGSDKTHTCPPCPAPELLGGPSV |
| | | | FLFPPKPKDTLMISRTPEVTCVVVDVSHEDPEVKENWYVDGVEVHNAKT |
| | | | KPCEEQYGSTYRCVSVLTVLHQDWLNGKEYKCKVSNKALPAPIEKTISK |
| | | | AKGQPREPQVYTLPPSREEMTKNQVSLTCLVKGFYPSDIAVEWESNGQP |
| | | | ENNYKTTPPVLDSDGSFFLYSKLTVDKSRWQQGNVFSCSVMHEALHNHY |
| | | | TQKSLSLSPGK |
| 839 | CS_PDL241.12_LH_CC_ | artificial | DIQMTQSPSSLSASVGDRVTITCKASQDVSTAVAWYQQKPGKAPKLLIY |
| | x_BC_A7_27-C4- | | SASYRYTGVPDRFTGSGSGTDFTLTISSLQPEDFATYYCQQHYSTPPYT |
| | G7_CC_x_I2C_x_scFc_ | | FGCGTKVEIKRGGGGQGGGGQGGGGQQVQLVQSGAEVKKPGASVKVSCK |
| | +R_clipopt | | ASGYAFSSSWMNWVRQAPGQCLEWIGRIYPGDADAKYNAKFKGKATLTA |
| | | | DKSTSTAYMELSSLRSEDTAVYYCARSTMIATGAMDYWGQGTLVTVSSG |
| | | | GGGQQVQLVQSGAEVKKPGASVKVSCKASGYTFTNHIIHWVRQAPGQCL |
| | | | EWMGYINPYPGYHAYNEKFQGRATMTSDTSTSTVYMELSSLRSEDTAVY |
| | | | YCARDGYYRDTDVLDYWGQGTLVTVSSGGGGQGGGGQGGGGQEIQMTQS |
| | | | PSSLSASVGDRVTITCQASQDISNYLNWYQQKPGKAPKLLIYYTSRLHT |
| | | | GVPSRFSGSGSGTDFTFTISSLEPEDIATYYCQQGNTLPWTFGCGTKVE |
| | | | IKSGGGGQEVQLVESGGGLVQPGGSLKLSCAASGFTFNKYAMNWVRQAP |
| | | | GKGLEWVARIRSKYNNYATYYADSVKDRFTISRDDSKNTAYLQMNNLKT |
| | | | EDTAVYYCVRHGNFGNSYISYWAYWGQGTLVTVSSGGGGQGGGGQGGGG |
| | | | QQTVVTQEPSLTVSPGGTVTLTCGSSTGAVTSGNYPNWVQQKPGQAPRG |
| | | | LIGGTKFLAPGTPARFSGSLLGGKAALTLSGVQPEDEAEYYCVLWYSNR |
| | | | WVFGGGTKLTVLGGGGCPPCPAPELLGGPSVFLFPPKPKDTLMISRTPE |
| | | | VTCVVVDVSHEEPEVKFNWYVDGVEVHNAKTKPCEEQYGSTYRCVSVLT |
| | | | VLHQDWLNGKEYKCKVSNKALPAPIEKTISKAKGQPREPQVYTLPPSRE |
| | | | EMTKNQVSLTCLVKGFYPSDIAVEWESNGQPENNYKTTPPVLDSDGSFF |
| | | | LYSKLTVDKSRWQQGNVFSCSVMHEALHNHYTQKSLSLSPGKGGGGQGG |
| | | | GGQGGGGQGGGGQGGGGQGGGGQCPPCPAPELLGGPSVFLFPPKPKDTL |
| | | | MISRTPEVTCVVVDVSHEEPEVKFNWYVDGVEVHNAKTKPCEEQYGSTY |
| | | | RCVSVLTVLHQDWLNGKEYKCKVSNKALPAPIEKTISKAKGQPREPQVY |
| | | | TLPPSREEMTKNQVSLTCLVKGFYPSDIAVEWESNGQPENNYKTTPPVL |
| | | | DSDGSFFLYSKLTVDKSRWQQGNVFSCSVMHEALHNHYTQKSLSLSPGK |
| 840 | CS_PDL241.12_LH_CC_ | artificial | DIQMTQSPSSLSASVGDRVTITCKASQDVSTAVAWYQQKPGKAPKLLIY |
| | x_BC_A7_27-C4- | | SASYRYTGVPDRFTGSGSGTDFTLTISSLQPEDFATYYCQQHYSTPPYT |
| | G7_CC_x_I2C_x_scFc_ | | FGCGTKVEIKGGGGQGGGGQGGGGQQVQLVQSGAEVKKPGASVKVSCKA |
| | −R_clipopt | | SGYAFSSSWMNWVRQAPGQCLEWIGRIYPGDADAKYNAKFKGKATLTAD |
| | | | KSTSTAYMELSSLRSEDTAVYYCARSTMIATGAMDYWGQGTLVTVSSGG |
| | | | GGQQVQLVQSGAEVKKPGASVKVSCKASGYTFTNHIIHWVRQAPGQCLE |
| | | | WMGYINPYPGYHAYNEKFQGRATMTSDTSTSTVYMELSSLRSEDTAVYY |
| | | | CARDGYYRDTDVLDYWGQGTLVTVSSGGGGQGGGGQGGGGQEIQMTQSP |
| | | | SSLSASVGDRVTITCQASQDISNYLNWYQQKPGKAPKLLIYYTSRLHTG |
| | | | VPSRFSGSGSGTDFTFTISSLEPEDIATYYCQQGNTLPWTFGCGTKVEI |
| | | | KSGGGGQEVQLVESGGGLVQPGGSLKLSCAASGFTFNKYAMNWVRQAPG |
| | | | KGLEWVARIRSKYNNYATYYADSVKDRFTISRDDSKNTAYLQMNNLKTE |
| | | | DTAVYYCVRHGNFGNSYISYWAYWGQGTLVTVSSGGGGQGGGGQGGGGQ |
| | | | QTVVTQEPSLTVSPGGTVTLTCGSSTGAVTSGNYPNWVQQKPGQAPRGL |
| | | | IGGTKFLAPGTPARFSGSLLGGKAALTLSGVQPEDEAEYYCVLWYSNRW |
| | | | VFGGGTKLTVLGGGGCPPCPAPELLGGPSVFLFPPKPKDTLMISRTPEV |
| | | | TCVVVDVSHEEPEVKENWYVDGVEVHNAKTKPCEEQYGSTYRCVSVLTV |
| | | | LHQDWLNGKEYKCKVSNKALPAPIEKTISKAKGQPREPQVYTLPPSREE |
| | | | MTKNQVSLTCLVKGFYPSDIAVEWESNGQPENNYKTTPPVLDSDGSFFL |
| | | | YSKLTVDKSRWQQGNVFSCSVMHEALHNHYTQKSLSLSPGKGGGGQGGG |
| | | | GQGGGGQGGGGQGGGGQGGGGQCPPCPAPELLGGPSVFLFPPKPKDTLM |
| | | | ISRTPEVTCVVVDVSHEEPEVKFNWYVDGVEVHNAKTKPCEEQYGSTYR |
| | | | CVSVLTVLHQDWLNGKEYKCKVSNKALPAPIEKTISKAKGQPREPQVYT |
| | | | LPPSREEMTKNQVSLTCLVKGFYPSDIAVEWESNGQPENNYKTTPPVLD |
| | | | SDGSFFLYSKLTVDKSRWQQGNVFSCSVMHEALHNHYTQKSLSLSPGK |
| 841 | CS_PDL241.12_LH_CC_ | artificial | DIQMTQSPSSLSASVGDRVTITCKASQDVSTAVAWYQQKPGKAPKLLIY |
| | x_BC_A7_27-C4- | | SASYRYTGVPDRFTGSGSGTDFTLTISSLQPEDFATYYCQQHYSTPPYT |
| | G7_CC_x_I2C_x_scFc_ | | FGCGTKVEIKGGGGSGGGGSGGGGSQVQLVQSGAEVKKPGASVKVSCKA |
| | −R-S | | SGYAFSSSWMNWVRQAPGQCLEWIGRIYPGDADAKYNAKFKGKATLTAD |
| | | | KSTSTAYMELSSLRSEDTAVYYCARSTMIATGAMDYWGQGTLVTVSSGG |
| | | | GGSQVQLVQSGAEVKKPGASVKVSCKASGYTFTNHIIHWVRQAPGQCLE |
| | | | WMGYINPYPGYHAYNEKFQGRATMTSDTSTSTVYMELSSLRSEDTAVYY |
| | | | CARDGYYRDTDVLDYWGQGTLVTVSSGGGGSGGGGSGGGGSDIQMTQSP |
| | | | SSLSASVGDRVTITCQASQDISNYLNWYQQKPGKAPKLLIYYTSRLHTG |
| | | | VPSRFSGSGSGTDFTFTISSLEPEDIATYYCQQGNTLPWTFGCGTKVEI |
| | | | KSGGGGSEVQLVESGGGLVQPGGSLKLSCAASGFTFNKYAMNWVRQAPG |
| | | | KGLEWVARIRSKYNNYATYYADSVKDRFTISRDDSKNTAYLQMNNLKTE |
| | | | DTAVYYCVRHGNFGNSYISYWAYWGQGTLVTVSSGGGGSGGGGSGGGGS |
| | | | QTVVTQEPSLTVSPGGTVTLTCGSSTGAVTSGNYPNWVQQKPGQAPRGL |
| | | | IGGTKFLAPGTPARFSGSLLGGKAALTLSGVQPEDEAEYYCVLWYSNRW |
| | | | VFGGGTKLTVLGGGGDKTHTCPPCPAPELLGGPSVFLFPPKPKDTLMIS |
| | | | RTPEVTCVVVDVSHEDPEVKENWYVDGVEVHNAKTKPCEEQYGSTYRCV |
| | | | SVLTVLHQDWLNGKEYKCKVSNKALPAPIEKTISKAKGQPREPQVYTLP |
| | | | PSREEMTKNQVSLTCLVKGFYPSDIAVEWESNGQPENNYKTTPPVLDSD |
| | | | GSFFLYSKLTVDKSRWQQGNVFSCSVMHEALHNHYTQKSLSLSPGKGGG |
| | | | GSGGGGSGGGGSGGGGSGGGGSGGGGSDKTHTCPPCPAPELLGGPSVFL |
| | | | FPPKPKDTLMISRTPEVTCVVVDVSHEDPEVKFNWYVDGVEVHNAKTKP |
| | | | CEEQYGSTYRCVSVLTVLHQDWLNGKEYKCKVSNKALPAPIEKTISKAK |
| | | | GQPREPQVYTLPPSREEMTKNQVSLTCLVKGFYPSDIAVEWESNGQPEN |
| | | | NYKTTPPVLDSDGSFFLYSKLTVDKSRWQQGNVFSCSVMHEALHNHYTQ |
| | | | KSLSLSPGK |
| 842 | FL_7- | artificial | QVTLKESGPTLVKPTETLTLTCTLSGFSLNNARMGVSWIRQPPGKCLEW |
| | A8_CC_x_CD123_24- | | LAHIFSNDEKSYSTSLKNRLTISKDSSKTQVVLTMTNVDPVDTATYYCA |
| | B4- | | RIVGYGSGWYGFFDYWGQGTLVTVSSGGGGSGGGGSGGGGSDIQMTQSP |
| | f_NK_CC_x_I2C_x_scFc | | SSLSASVGDRVTITCRASQGIRNDLGWYQQKPGKAPKRLIYAASTLQSG |
| | | | VPSRFSGSGSGTEFTLTISSLQPEDFATYYCLQHNSYPLTFGCGTKVEI |
| | | | KSGGGGSEVQLLESGGGLVQPGGSLRLSCAASGFTFSHYAMSWVRQAPG |
| | | | KCLEWVSAVSGGGDKTLYADAVKGRFTISRDNSKNTLFLQMNSLRAEDT |
| | | | AIYYCARLRGFYYGMDVWGQGTTVTVSSGGGGSGGGGSGGGGSDIVLTQ |
| | | | SPLSLPVTPGEPASISCRSSQSLLHSNKYNYLDWYLQKPGQSPQLLIYL |
| | | | GSNRASGVPDRFSGSGSGTDFTLKISRVEAEDVGVYYCMQALQTPPITF |
| | | | GCGTRLEIKSGGGGSEVQLVESGGGLVQPGGSLKLSCAASGFTENKYAM |
| | | | NWVRQAPGKGLEWVARIRSKYNNYATYYADSVKDRFTISRDDSKNTAYL |
| | | | QMNNLKTEDTAVYYCVRHGNFGNSYISYWAYWGQGTLVTVSSGGGGSGG |
| | | | GGSGGGGSQTVVTQEPSLTVSPGGTVTLTCGSSTGAVTSGNYPNWVQQK |
| | | | PGQAPRGLIGGTKFLAPGTPARFSGSLLGGKAALTLSGVQPEDEAEYYC |
| | | | VLWYSNRWVFGGGTKLTVLGGGGDKTHTCPPCPAPELLGGPSVFLFPPK |
| | | | PKDTLMISRTPEVTCVVVDVSHEDPEVKENWYVDGVEVHNAKTKPCEEQ |
| | | | YGSTYRCVSVLTVLHQDWLNGKEYKCKVSNKALPAPIEKTISKAKGQPR |
| | | | EPQVYTLPPSREEMTKNQVSLTCLVKGFYPSDIAVEWESNGQPENNYKT |
| | | | TPPVLDSDGSFFLYSKLTVDKSRWQQGNVFSCSVMHEALHNHYTQKSLS |
| | | | LSPGKGGGGSGGGGSGGGGSGGGGSGGGGSGGGGSDKTHTCPPCPAPEL |
| | | | LGGPSVFLFPPKPKDTLMISRTPEVTCVVVDVSHEDPEVKENWYVDGVE |
| | | | VHNAKTKPCEEQYGSTYRCVSVLTVLHQDWLNGKEYKCKVSNKALPAPI |
| | | | EKTISKAKGQPREPQVYTLPPSREEMTKNQVSLTCLVKGFYPSDIAVEW |
| | | | ESNGQPENNYKTTPPVLDSDGSFFLYSKLTVDKSRWQQGNVFSCSVMHE |
| | | | ALHNHYTQKSLSLSPGK |
| 843 | FL_7- | artificial | QVTLKESGPTLVKPTETLTLTCTLSGFSLNNARMGVSWIRQPPGKCLEW |
| | A8_CC_x_CD123_24- | | LAHIFSNDEKSYSTSLKNRLTISKDSSKTQVVLTMTNVDPVDTATYYCA |
| | B4- | | RIVGYGSGWYGFFDYWGQGTLVTVSSGGGGQGGGGQGGGGQEIQMTQSP |
| | f_NK_CC_x_I2C_x_ | | SSLSASVGDRVTITCRASQGIRNDLGWYQQKPGKAPKRLIYAASTLQSG |
| | scFc_clipopt | | VPSRFSGSGSGTEFTLTISSLQPEDFATYYCLQHNSYPLTFGCGTKVEI |
| | | | KSGGGGQEVQLLESGGGLVQPGGSLRLSCAASGFTFSHYAMSWVRQAPG |
| | | | KCLEWVSAVSGGGDKTLYADAVKGRFTISRDNSKNTLFLQMNSLRAEDT |
| | | | AIYYCARLRGFYYGMDVWGQGTTVTVSSGGGGQGGGGQGGGGQEIVLTQ |
| | | | SPLSLPVTPGEPASISCRSSQSLLHSNKYNYLDWYLQKPGQSPQLLIYL |
| | | | GSNRASGVPDRFSGSGSGTDFTLKISRVEAEDVGVYYCMQALQTPPITF |
| | | | GCGTRLEIKSGGGGQEVQLVESGGGLVQPGGSLKLSCAASGFTENKYAM |
| | | | NWVRQAPGKGLEWVARIRSKYNNYATYYADSVKDRFTISRDDSKNTAYL |
| | | | QMNNLKTEDTAVYYCVRHGNFGNSYISYWAYWGQGTLVTVSSGGGGQGG |
| | | | GGQGGGGQQTVVTQEPSLTVSPGGTVTLTCGSSTGAVTSGNYPNWVQQK |
| | | | PGQAPRGLIGGTKFLAPGTPARFSGSLLGGKAALTLSGVQPEDEAEYYC |
| | | | VLWYSNRWVFGGGTKLTVLGGGGCPPCPAPELLGGPSVFLFPPKPKDTL |
| | | | MISRTPEVTCVVVDVSHEEPEVKENWYVDGVEVHNAKTKPCEEQYGSTY |
| | | | RCVSVLTVLHQDWLNGKEYKCKVSNKALPAPIEKTISKAKGQPREPQVY |
| | | | TLPPSREEMTKNQVSLTCLVKGFYPSDIAVEWESNGQPENNYKTTPPVL |
| | | | DSDGSFFLYSKLTVDKSRWQQGNVFSCSVMHEALHNHYTQKSLSLSPGK |
| | | | GGGGQGGGGQGGGGQGGGGQGGGGQGGGGQCPPCPAPELLGGPSVFLFP |
| | | | PKPKDTLMISRTPEVTCVVVDVSHEEPEVKFNWYVDGVEVHNAKTKPCE |
| | | | EQYGSTYRCVSVLTVLHQDWLNGKEYKCKVSNKALPAPIEKTISKAKGQ |
| | | | PREPQVYTLPPSREEMTKNQVSLTCLVKGFYPSDIAVEWESNGQPENNY |
| | | | KTTPPVLDSDGSFFLYSKLTVDKSRWQQGNVFSCSVMHEALHNHYTQKS |
| | | | LSLSPGK |
| 844 | CH3_15- | artificial | QVQLVQSGAEVKKPGASVKVSCKASGYTFTNYWMNWVRQAPGQCLEWMG |
| | E11_CC_EIx_I2L_x_S | | NIAYGVKGTNYNQKFQGRVTMTVDTSSSTAYMELSRLRSDDTAVYYCAT |
| | cFc_x_MS_15- | | RYFYVMDYWGQGTLVTVSSGGGGQGGGGQGGGGQEIQMTQSPSSLSASV |
| | B12_CC_EIx_I2L_ | | GDRVTITCRASQDISNYLNWYQQKPGKVPKLLIYYTSRLHSGVPSRFSG |
| | clipopt | | SGSGTDFTLTISSLQPEDVATYYCVQYAQFPLTFGCGTKVEIKSGGGGQ |
| | | | EVQLVESGGGLVQPGGSLKLSCAASGFTFNKYAMNWVRQAPGKGMEWVA |
| | | | RIRSKYNNYATYYADAVKDRFTISRDDSKNTLYLQMNNLKTEDTAVYYC |
| | | | VRAGNFGSSYISYFAYWGQGTLVTVSSGGGGQGGGGQGGGGQQTVVTQE |
| | | | PSLTVSPGGTVTITCGSSTGAVTSGNYPNWIQKKPGQAPRGLIGGTKFL |
| | | | APGTPARFSGSLEGGKAALTLSGVQPEDEAEYYCVLYYSNRWVFGSGTK |
| | | | LTVLGGGGCPPCPAPELLGGPSVFLFPPKPKDTLMISRTPEVTCVVVDV |
| | | | SHEEPEVKFNWYVDGVEVHNAKTKPCEEQYGSTYRCVSVLTVLHQDWLN |
| | | | GKEYKCKVSNKALPAPIEKTISKAKGQPREPQVYTLPPSREEMTKNQVS |
| | | | LTCLVKGFYPSDIAVEWESNGQPENNYKTTPPVLDSDGSFFLYSKLTVD |
| | | | KSRWQQGNVFSCSVMHEALHNHYTQKSLSLSPGKGGGGQGGGGQGGGGQ |
| | | | GGGGQGGGGQGGGGQCPPCPAPELLGGPSVFLFPPKPKDTLMISRTPEV |
| | | | TCVVVDVSHEEPEVKFNWYVDGVEVHNAKTKPCEEQYGSTYRCVSVLTV |
| | | | LHQDWLNGKEYKCKVSNKALPAPIEKTISKAKGQPREPQVYTLPPSREE |
| | | | MTKNQVSLTCLVKGFYPSDIAVEWESNGQPENNYKTTPPVLDSDGSFFL |
| | | | YSKLTVDKSRWQQGNVFSCSVMHEALHNHYTQKSLSLSPGKGGGGQVQL |
| | | | QESGPGLVKPSETLSLTCTVSGGSISSSSYFWGWIRQPPGKCLEWIGNI |
| | | | YYSGSSNYNPSLKSRVTISVDTSKNQFSLKLSSVTAADTAVYYCARLPR |
| | | | GDRDAFDIWGQGTMVTVSSGGGGQGGGGQGGGGQEIVMTQSPSSLSASV |
| | | | GDRVTITCRASQGISNYLAWYQQKPGKVPKLLIYAASTLQSGVPSRFSG |
| | | | SGSGTDFTLTISSLQPEDFATYYCQQSYSTPFTFGCGTKVEIKSGGGGQ |
| | | | EVQLVESGGGLVQPGGSLKLSCAASGFTFNKYAMNWVRQAPGKGMEWVA |
| | | | RIRSKYNNYATYYADAVKDRFTISRDDSKNTLYLQMNNLKTEDTAVYYC |
| | | | VRAGNFGSSYISYFAYWGQGTLVTVSSGGGGQGGGGQGGGGQQTVVTQE |
| | | | PSLTVSPGGTVTITCGSSTGAVTSGNYPNWIQKKPGQAPRGLIGGTKFL |
| | | | APGTPARFSGSLEGGKAALTLSGVQPEDEAEYYCVLYYSNRWVFGSGTK |
| | | | LTVL |
| 845 | CH3_15- | artificial | QVQLVQSGAEVKKPGASVKVSCKASGYTFTNYWMNWVRQAPGQCLEWMG |
| | E11_CC_x_I2L_x_scFc | | NIAYGVKGTNYNQKFQGRVTMTVDTSSSTAYMELSRLRSDDTAVYYCAT |
| | X MS_15- | | RYFYVMDYWGQGTLVTVSSGGGGSGGGGSGGGGSDIQMTQSPSSLSASV |
| | B12_CC_x_I2L_(R3I) | | GDRVTITCRASQDISNYLNWYQQKPGKVPKLLIYYTSRLHSGVPSRFSG |
| | | | SGSGTDFTLTISSLQPEDVATYYCVQYAQFPLTFGCGTKVEIKSGGGGS |
| | | | EVQLVESGGGLVQPGGSLKLSCAASGFTFNKYAMNWVRQAPGKGMEWVA |
| | | | RIRSKYNNYATYYADAVKDRFTISRDDSKNTLYLQMNNLKTEDTAVYYC |
| | | | VRAGNFGSSYISYFAYWGQGTLVTVSSGGGGSGGGGSGGGGSQTVVTQE |
| | | | PSLTVSPGGTVTITCGSSTGAVTSGNYPNWIQKKPGQAPRGLIGGTKFL |
| | | | APGTPARFSGSLEGGKAALTLSGVQPEDEAEYYCVLYYSNRWVFGSGTK |
| | | | LTVLGGGGDKTHTCPPCPAPELLGGPSVFLFPPKPKDTLMISRTPEVTC |
| | | | VVVDVSHEDPEVKFNWYVDGVEVHNAKTKPCEEQYGSTYRCVSVLTVLH |
| | | | QDWLNGKEYKCKVSNKALPAPIEKTISKAKGQPREPQVYTLPPSREEMT |
| | | | KNQVSLTCLVKGFYPSDIAVEWESNGQPENNYKTTPPVLDSDGSFFLYS |
| | | | KLTVDKSRWQQGNVFSCSVMHEALHNHYTQKSLSLSPGKGGGGSGGGGS |
| | | | GGGGSGGGGSGGGGSGGGGSDKTHTCPPCPAPELLGGPSVFLFPPKPKD |
| | | | TLMISRTPEVTCVVVDVSHEDPEVKENWYVDGVEVHNAKTKPCEEQYGS |
| | | | TYRCVSVLTVLHQDWLNGKEYKCKVSNKALPAPIEKTISKAKGQPREPQ |
| | | | VYTLPPSREEMTKNQVSLTCLVKGFYPSDIAVEWESNGQPENNYKTTPP |
| | | | VLDSDGSFFLYSKLTVDKSRWQQGNVFSCSVMHEALHNHYTQKSLSLSP |
| | | | GKGGGGQVQLQESGPGLVKPSETLSLTCTVSGGSISSSSYFWGWIRQPP |
| | | | GKCLEWIGNIYYSGSSNYNPSLKSRVTISVDTSKNQFSLKLSSVTAADT |
| | | | AVYYCARLPRGDRDAFDIWGQGTMVTVSSGGGGSGGGGSGGGGSDIVMT |
| | | | QSPSSLSASVGDRVTITCRASQGISNYLAWYQQKPGKVPKLLIYAASTL |
| | | | QSGVPSRFSGSGSGTDFTLTISSLQPEDFATYYCQQSYSTPFTFGCGTK |
| | | | VEIKSGGGGSEVQLVESGGGLVQPGGSLKLSCAASGFTENKYAMNWVRQ |
| | | | APGKGMEWVARIRSKYNNYATYYADAVKDRFTISRDDSKNTLYLQMNNL |
| | | | KTEDTAVYYCVRAGNFGSSYISYFAYWGQGTLVTVSSGGGGSGGGGSGG |
| | | | GGSQTVVTQEPSLTVSPGGTVTITCGSSTGAVTSGNYPNWIQKKPGQAP |
| | | | RGLIGGTKFLAPGTPARFSGSLEGGKAALTLSGVQPEDEAEYYCVLYYS |
| | | | NRWVFGSGTKLTVL |
| 846 | CH3_15- | artificial | QVQLVQSGAEVKKPGASVKVSCKASGYTFTNYWMNWVRQAPGQCLEWMG |
| | E11_CC_x_I2L_x_scFc_ | | NIAYGVKGTNYNQKFQGRVTMTVDTSSSTAYMELSRLRSDDTAVYYCAT |
| | x_MS_15- | | RYFYVMDYWGQGTLVTVSSGGGGQGGGGQGGGGQDIQMTQSPSSLSASV |
| | B12_CC_x_I2L_ | | GDRVTITCRASQDISNYLNWYQQKPGKVPKLLIYYTSRLHSGVPSRFSG |
| | clipopt_(F5Q) | | SGSGTDFTLTISSLQPEDVATYYCVQYAQFPLTFGCGTKVEIKSGGGGQ |
| | | | EVQLVESGGGLVQPGGSLKLSCAASGFTFNKYAMNWVRQAPGKGMEWVA |
| | | | RIRSKYNNYATYYADAVKDRFTISRDDSKNTLYLQMNNLKTEDTAVYYC |
| | | | VRAGNFGSSYISYFAYWGQGTLVTVSSGGGGQGGGGQGGGGQQTVVTQE |
| | | | PSLTVSPGGTVTITCGSSTGAVTSGNYPNWIQKKPGQAPRGLIGGTKFL |
| | | | APGTPARFSGSLEGGKAALTLSGVQPEDEAEYYCVLYYSNRWVFGSGTK |
| | | | LTVLGGGGCPPCPAPELLGGPSVFLFPPKPKDTLMISRTPEVTCVVVDV |
| | | | SHEEPEVKFNWYVDGVEVHNAKTKPCEEQYGSTYRCVSVLTVLHQDWLN |
| | | | GKEYKCKVSNKALPAPIEKTISKAKGQPREPQVYTLPPSREEMTKNQVS |
| | | | LTCLVKGFYPSDIAVEWESNGQPENNYKTTPPVLDSDGSFFLYSKLTVD |
| | | | KSRWQQGNVFSCSVMHEALHNHYTQKSLSLSPGKGGGGQGGGGQGGGGQ |
| | | | GGGGQGGGGQGGGGQCPPCPAPELLGGPSVFLFPPKPKDTLMISRTPEV |
| | | | TCVVVDVSHEEPEVKFNWYVDGVEVHNAKTKPCEEQYGSTYRCVSVLTV |
| | | | LHQDWLNGKEYKCKVSNKALPAPIEKTISKAKGQPREPQVYTLPPSREE |
| | | | MTKNQVSLTCLVKGFYPSDIAVEWESNGQPENNYKTTPPVLDSDGSFFL |
| | | | YSKLTVDKSRWQQGNVFSCSVMHEALHNHYTQKSLSLSPGKGGGGQVQL |
| | | | QESGPGLVKPSETLSLTCTVSGGSISSSSYFWGWIRQPPGKCLEWIGNI |
| | | | YYSGSSNYNPSLKSRVTISVDTSKNQFSLKLSSVTAADTAVYYCARLPR |
| | | | GDRDAFDIWGQGTMVTVSSGGGGQGGGGQGGGGQDIVMTQSPSSLSASV |
| | | | GDRVTITCRASQGISNYLAWYQQKPGKVPKLLIYAASTLQSGVPSRFSG |
| | | | SGSGTDFTLTISSLQPEDFATYYCQQSYSTPFTFGCGTKVEIKSGGGGQ |
| | | | EVQLVESGGGLVQPGGSLKLSCAASGFTFNKYAMNWVRQAPGKGMEWVA |
| | | | RIRSKYNNYATYYADAVKDRFTISRDDSKNTLYLQMNNLKTEDTAVYYC |
| | | | VRAGNFGSSYISYFAYWGQGTLVTVSSGGGGQGGGGQGGGGQQTVVTQE |
| | | | PSLTVSPGGTVTITCGSSTGAVTSGNYPNWIQKKPGQAPRGLIGGTKFL |
| | | | APGTPARFSGSLEGGKAALTLSGVQPEDEAEYYCVLYYSNRWVFGSGTK |
| | | | LTVL |
| 847 | Human CD3epsilon | artificial | QDGNEEMGGITQTPYKVSISGTTVILTCPQYPGSEILWQHNDKNIGGDE |
| | ECD | | DDKNIGSDEDHLSLKEFSELEQSGYYVCYPRGSKPEDANFYLYLRARVC |
| | | | ENCMEMD |
| 848 | Human CD3epsilon | artificial | QDGNEEMGGITQTPYKVSISGTTVILT |
| | ECD/pos. 1-27 | | |
| 849 | scFc-Spacer | artificial | DKTHTCPPCPAPELLGGPSVFLFPPKPKDTLMISRTPEVTCVVVDVSHE |
| | | | DPEVKFNWYVDGVEVHNAKTKPCEEQYGSTYRCVSVLTVLHQDWLNGKE |
| | | | YKCKVSNKALPAPIEKTISKAKGQPREPQVYTLPPSREEMTKNQVSLTC |
| | | | LVKGFYPSDIAVEWESNGQPENNYKTTPPVLDSDGSFFLYSKLTVDKSR |
| | | | WQQGNVFSCSVMHEALHNHYTQKSLSLSPGKGGGGSGGGGSGGGGSGGG |
| | | | GSGGGGSGGGGSDKTHTCPPCPAPELLGGPSVFLFPPKPKDTLMISRTP |
| | | | EVTCVVVDVSHEDPEVKENWYVDGVEVHNAKTKPCEEQYGSTYRCVSVL |
| | | | TVLHQDWLNGKEYKCKVSNKALPAPIEKTISKAKGQPREPQVYTLPPSR |
| | | | EEMTKNQVSLTCLVKGFYPSDIAVEWESNGQPENNYKTTPPVLDSDGSF |
| | | | FLYSKLTVDKSRWQQGNVFSCSVMHEALHNHYTQKSLSLSPGK |
| 850 | scFc_mod_GQ_ | artificial | CPPCPAPELLGGPSVFLFPPKPKDTLMISRTPEVTCVVVDVSHEEPEVK |
| | clippingVariante- | | FNWYVDGVEVHNAKTKPCEEQYGSTYRCVSVLTVLHQDWLNGKEYKCKV |
| | Spacer | | SNKALPAPIEKTISKAKGQPREPQVYTLPPSREEMTKNQVSLTCLVKGF |
| | | | YPSDIAVEWESNGQPENNYKTTPPVLDSDGSFFLYSKLTVDKSRWQQGN |
| | | | VFSCSVMHEALHNHYTQKSLSLSPGKGGGGQGGGGQGGGGQGGGGQGGG |
| | | | GQGGGGQCPPCPAPELLGGPSVFLFPPKPKDTLMISRTPEVTCVVVDVS |
| | | | HEEPEVKFNWYVDGVEVHNAKTKPCEEQYGSTYRCVSVLTVLHQDWLNG |
| | | | KEYKCKVSNKALPAPIEKTISKAKGQPREPQVYTLPPSREEMTKNQVSL |
| | | | TCLVKGFYPSDIAVEWESNGQPENNYKTTPPVLDSDGSFFLYSKLTVDK |
| | | | SRWQQGNVFSCSVMHEALHNHYTQKSLSLSPGK |

The application's sequence listing, which the Patent Office published only in electronic form, follows.

SEQUENCE LISTING (850 sequences)

SEQ ID NO: 1 - protein, 4 aa, Artificial Sequence
  Synthetic
GGGG

SEQ ID NO: 2 - protein, 5 aa, Artificial Sequence
  Synthetic
GGGGA

SEQ ID NO: 3 - protein, 5 aa, Artificial Sequence
  Synthetic
GGGGC

SEQ ID NO: 4 - protein, 5 aa, Artificial Sequence
  Synthetic
GGGGD

SEQ ID NO: 5 - protein, 5 aa, Artificial Sequence
  Synthetic
GGGGE

SEQ ID NO: 6 - protein, 5 aa, Artificial Sequence
  Synthetic
GGGGF

SEQ ID NO: 7 - protein, 5 aa, Artificial Sequence
  Synthetic
GGGGG

SEQ ID NO: 8 - protein, 5 aa, Artificial Sequence
  Synthetic
GGGGH

SEQ ID NO: 9 - protein, 5 aa, Artificial Sequence
  Synthetic
GGGGI

SEQ ID NO: 10 - protein, 5 aa, Artificial Sequence
  Synthetic
GGGGK

SEQ ID NO: 11 - protein, 5 aa, Artificial Sequence
  Synthetic
GGGGL

SEQ ID NO: 12 - protein, 5 aa, Artificial Sequence
  Synthetic
GGGGM

SEQ ID NO: 13 - protein, 5 aa, Artificial Sequence
  Synthetic
GGGGN

SEQ ID NO: 14 - protein, 5 aa, Artificial Sequence
  Synthetic
GGGGP

SEQ ID NO: 15 - protein, 5 aa, Artificial Sequence
  Synthetic
GGGGQ

SEQ ID NO: 16 - protein, 5 aa, Artificial Sequence
  Synthetic
GGGGS

SEQ ID NO: 17 - protein, 5 aa, Artificial Sequence
  Synthetic
GGGGT

SEQ ID NO: 18 - protein, 5 aa, Artificial Sequence
  Synthetic
GGGGV

SEQ ID NO: 19 - protein, 5 aa, Artificial Sequence
  Synthetic
GGGGW

SEQ ID NO: 20 - protein, 5 aa, Artificial Sequence
  Synthetic
GGGGY

SEQ ID NO: 21 - protein, 6 aa, Artificial Sequence
  Synthetic
SGGGGA

SEQ ID NO: 22 - protein, 6 aa, Artificial Sequence
  Synthetic
SGGGGC

SEQ ID NO: 23 - protein, 6 aa, Artificial Sequence
  Synthetic
SGGGGD

SEQ ID NO: 24 - protein, 6 aa, Artificial Sequence
  Synthetic
SGGGGE

SEQ ID NO: 25 - protein, 6 aa, Artificial Sequence
  Synthetic
SGGGGF

SEQ ID NO: 26 - protein, 6 aa, Artificial Sequence
  Synthetic
SGGGGG

SEQ ID NO: 27 - protein, 6 aa, Artificial Sequence
  Synthetic
SGGGGH

SEQ ID NO: 28 - protein, 6 aa, Artificial Sequence
  Synthetic
SGGGGI

SEQ ID NO: 29 - protein, 6 aa, Artificial Sequence
  Synthetic
SGGGGK

SEQ ID NO: 30 - protein, 6 aa, Artificial Sequence
  Synthetic
SGGGGL

SEQ ID NO: 31 - protein, 6 aa, Artificial Sequence
  Synthetic
SGGGGM

SEQ ID NO: 32 - protein, 6 aa, Artificial Sequence
  Synthetic
SGGGGN

SEQ ID NO: 33 - protein, 6 aa, Artificial Sequence
  Synthetic
SGGGGP

SEQ ID NO: 34 - protein, 6 aa, Artificial Sequence
  Synthetic
SGGGGQ

SEQ ID NO: 35 - protein, 6 aa, Artificial Sequence
  Synthetic
SGGGGS

SEQ ID NO: 36 - protein, 6 aa, Artificial Sequence
  Synthetic
SGGGGT

SEQ ID NO: 37 - protein, 6 aa, Artificial Sequence
  Synthetic
SGGGGV

SEQ ID NO: 38 - protein, 6 aa, Artificial Sequence
  Synthetic
SGGGGW

SEQ ID NO: 39 - protein, 6 aa, Artificial Sequence
  Synthetic
SGGGGY

SEQ ID NO: 40 - protein, 15 aa, Artificial Sequence
  Synthetic
GGGGAGGGGAGGGGA

SEQ ID NO: 41 - protein, 15 aa, Artificial Sequence
  Synthetic
GGGGCGGGGCGGGGC

SEQ ID NO: 42 - protein, 15 aa, Artificial Sequence
  Synthetic
GGGGDGGGGDGGGGD

SEQ ID NO: 43 - protein, 15 aa, Artificial Sequence
  Synthetic
GGGGEGGGGEGGGGE

SEQ ID NO: 44 - protein, 15 aa, Artificial Sequence
  Synthetic
GGGGFGGGGFGGGGF

SEQ ID NO: 45 - protein, 15 aa, Artificial Sequence
  Synthetic
GGGGGGGGGGGGGGG

SEQ ID NO: 46 - protein, 15 aa, Artificial Sequence
  Synthetic
GGGGHGGGGHGGGGH

SEQ ID NO: 47 - protein, 15 aa, Artificial Sequence
  Synthetic
GGGGIGGGGIGGGGI

SEQ ID NO: 48 - protein, 15 aa, Artificial Sequence
  Synthetic
GGGGKGGGGKGGGGK

SEQ ID NO: 49 - protein, 15 aa, Artificial Sequence
  Synthetic
GGGGLGGGGLGGGGL

SEQ ID NO: 50 - protein, 15 aa, Artificial Sequence
  Synthetic
GGGGMGGGGMGGGGM

SEQ ID NO: 51 - protein, 15 aa, Artificial Sequence
  Synthetic
GGGGNGGGGNGGGGN

SEQ ID NO: 52 - protein, 15 aa, Artificial Sequence
  Synthetic
GGGGPGGGGPGGGGP

SEQ ID NO: 53 - protein, 15 aa, Artificial Sequence
  Synthetic
GGGGQGGGGQGGGGQ

SEQ ID NO: 54 - protein, 15 aa, Artificial Sequence
  Synthetic
GGGGSGGGGSGGGGS

SEQ ID NO: 55 - protein, 15 aa, Artificial Sequence
  Synthetic
GGGGTGGGGTGGGGT

SEQ ID NO: 56 - protein, 15 aa, Artificial Sequence
  Synthetic
GGGGVGGGGVGGGGV

SEQ ID NO: 57 - protein, 15 aa, Artificial Sequence
  Synthetic
GGGGWGGGGWGGGGW

SEQ ID NO: 58 - protein, 15 aa, Artificial Sequence
  Synthetic
GGGGYGGGGYGGGGY

SEQ ID NO: 59 - protein, 30 aa, Artificial Sequence
  Synthetic
GGGGAGGGGAGGGGAGGGGAGGGGAGGGGA

SEQ ID NO: 60 - protein, 30 aa, Artificial Sequence
  Synthetic
GGGGCGGGGCGGGGCGGGGCGGGGCGGGGC

SEQ ID NO: 61 - protein, 30 aa, Artificial Sequence
  Synthetic
GGGGDGGGGDGGGGDGGGGDGGGGDGGGGD

SEQ ID NO: 62 - protein, 30 aa, Artificial Sequence
  Synthetic
GGGGEGGGGEGGGGEGGGGEGGGGEGGGGE

SEQ ID NO: 63 - protein, 30 aa, Artificial Sequence
  Synthetic
GGGGFGGGGFGGGGFGGGGFGGGGFGGGGF

SEQ ID NO: 64 - protein, 30 aa, Artificial Sequence
  Synthetic
GGGGGGGGGGGGGGGGGGGGGGGGGGGGGG

SEQ ID NO: 65 - protein, 30 aa, Artificial Sequence
  Synthetic
GGGGHGGGGHGGGGHGGGGHGGGGHGGGGH

SEQ ID NO: 66 - protein, 30 aa, Artificial Sequence
  Synthetic
GGGGIGGGGIGGGGIGGGGIGGGGIGGGGI

SEQ ID NO: 67 - protein, 30 aa, Artificial Sequence
  Synthetic
GGGGKGGGGKGGGGKGGGGKGGGGKGGGGK

SEQ ID NO: 68 - protein, 30 aa, Artificial Sequence
  Synthetic
GGGGLGGGGLGGGGLGGGGLGGGGLGGGGL

SEQ ID NO: 69 - protein, 30 aa, Artificial Sequence
  Synthetic
GGGGMGGGGMGGGGMGGGGMGGGGMGGGGM

SEQ ID NO: 70 - protein, 30 aa, Artificial Sequence
  Synthetic
GGGGNGGGGNGGGGNGGGGNGGGGNGGGGN

SEQ ID NO: 71 - protein, 30 aa, Artificial Sequence
  Synthetic
GGGGPGGGGPGGGGPGGGGPGGGGPGGGGP

SEQ ID NO: 72 - protein, 30 aa, Artificial Sequence
  Synthetic
GGGGQGGGGQGGGGQGGGGQGGGGQGGGGQ

SEQ ID NO: 73 - protein, 30 aa, Artificial Sequence
  Synthetic
GGGGSGGGGSGGGGSGGGGSGGGGSGGGGS

SEQ ID NO: 74 - protein, 30 aa, Artificial Sequence
  Synthetic
GGGGTGGGGTGGGGTGGGGTGGGGTGGGGT

SEQ ID NO: 75 - protein, 30 aa, Artificial Sequence
  Synthetic
GGGGVGGGGVGGGGVGGGGVGGGGVGGGGV

SEQ ID NO: 76 - protein, 30 aa, Artificial Sequence
  Synthetic
GGGGWGGGGWGGGGWGGGGWGGGGWGGGGW

SEQ ID NO: 77 - protein, 30 aa, Artificial Sequence
  Synthetic
GGGGYGGGGYGGGGYGGGGYGGGGYGGGGY

SEQ ID NO: 78 - protein, 227 aa, Artificial Sequence
  Synthetic
DKTHTCPPCPAPELLGGPSVFLFPPKPKDTLMISRTPEVTCVVVDVSHEDPEVKFNWYVDGVEVHNAKTKPCEEQYGSTYRCVSVLTVLHQDWLNGKEYKCKVSNKALPAPIEKTISKAKGQPREPQVYTLPPSREEMTKNQVSLTCLVKGFYPSDIAVEWESNGQPENNYKTTPPVLDSDGSFFLYSKLTVDKSRWQQGNVFSCSVMHEALHNHYTQKSLSLSPGK

SEQ ID NO: 79 - protein, 225 aa, Artificial Sequence
  Synthetic
DKTHTCPPCPAPELLGGPSVFLFPPKPKDTLMISRTPEVTCVVVDVSHEDPEVKFNWYVDGVEVHNAKTKPCEEQYGSTYRCVSVLTVLHQDWLNGKEYKCKVSNKALPAPIEKTISKAKGQPREPQVYTLPPSREEMTKNQVSLTCLVKGFYPSDIAVEWESNGQPENNYKTTPPVLDSDGSFFLYSKLTVDKSRWQQGNVFSCSVMHEALHNHYTQKSLSLSP

SEQ ID NO: 80 - protein, 222 aa, Artificial Sequence
  Synthetic
CPPCPAPELLGGPSVFLFPPKPKDTLMISRTPEVTCVVVDVSHEEPEVKFNWYVDGVEVHNAKTKPCEEQYGSTYRCVSVLTVLHQDWLNGKEYKCKVSNKALPAPIEKTISKAKGQPREPQVYTLPPSREEMTKNQVSLTCLVKGFYPSDIAVEWESNGQPENNYKTTPPVLDSDGSFFLYSKLTVDKSRWQQGNVFSCSVMHEALHNHYTQKSLSLSPGK

SEQ ID NO: 81 - protein, 220 aa, Artificial Sequence
  Synthetic
CPPCPAPELLGGPSVFLFPPKPKDTLMISRTPEVTCVVVDVSHEEPEVKFNWYVDGVEVHNAKTKPCEEQYGSTYRCVSVLTVLHQDWLNGKEYKCKVSNKALPAPIEKTISKAKGQPREPQVYTLPPSREEMTKNQVSLTCLVKGFYPSDIAVEWESNGQPENNYKTTPPVLDSDGSFFLYSKLTVDKSRWQQGNVFSCSVMHEALHNHYTQKSLSLSP

SEQ ID NO: 82 - protein, 5 aa, Artificial Sequence
  Synthetic
KYAMN

SEQ ID NO: 83 - protein, 19 aa, Artificial Sequence
  Synthetic
RIRSKYNNYATYYADAVKD

SEQ ID NO: 84 - protein, 14 aa, Artificial Sequence
  Synthetic
AGNFGTSYISYWAY

SEQ ID NO: 85 - protein, 14 aa, Artificial Sequence
  Synthetic
GSSTGAVTSGNYPN

SEQ ID NO: 86 - protein, 7 aa, Artificial Sequence
  Synthetic
GTKFLAP

SEQ ID NO: 87 - protein, 9 aa, Artificial Sequence
  Synthetic
VLWYSNRWV

SEQ ID NO: 88 - protein, 5 aa, Artificial Sequence
  Synthetic
KYAMN

SEQ ID NO: 89 - protein, 19 aa, Artificial Sequence
  Synthetic
RIRSKYNNYATYYADAVKD

SEQ ID NO: 90 - protein, 14 aa, Artificial Sequence
  Synthetic
AGNFGTSYISYWAY

SEQ ID NO: 91 - protein, 14 aa, Artificial Sequence
  Synthetic
GSSTGAVTSGNYPN

SEQ ID NO: 92 - protein, 7 aa, Artificial Sequence
  Synthetic
GTKFLAP

SEQ ID NO: 93 - protein, 9 aa, Artificial Sequence
  Synthetic
VLWYSNRWV

SEQ ID NO: 94 - protein, 5 aa, Artificial Sequence
  Synthetic
KYAMN

SEQ ID NO: 95 - protein, 19 aa, Artificial Sequence
  Synthetic
RIRSKYNNYATYYADAVKD

SEQ ID NO: 96 - protein, 14 aa, Artificial Sequence
  Synthetic
AGNFGTSYISYWAY

SEQ ID NO: 97 - protein, 14 aa, Artificial Sequence
  Synthetic
GSSTGAVTSGNYPN

SEQ ID NO: 98 - protein, 7 aa, Artificial Sequence
  Synthetic
GTKFLAP

SEQ ID NO: 99 - protein, 9 aa, Artificial Sequence
  Synthetic
VLWYSNRWV

SEQ ID NO: 100 - protein, 5 aa, Artificial Sequence
  Synthetic
KYAMN

SEQ ID NO: 101 - protein, 19 aa, Artificial Sequence
  Synthetic
RIRSKYNNYATYYADAVKD

SEQ ID NO: 102 - protein, 14 aa, Artificial Sequence
  Synthetic
AGNFGTSYISYWAY

SEQ ID NO: 103 - protein, 14 aa, Artificial Sequence
  Synthetic
GSSTGAVTSGNYPN

SEQ ID NO: 104 - protein, 7 aa, Artificial Sequence
  Synthetic
GTKFLAP

SEQ ID NO: 105 - protein, 9 aa, Artificial Sequence
  Synthetic
VLWYSNRWV

SEQ ID NO: 106 - protein, 5 aa, Artificial Sequence
  Synthetic
KYAIN

SEQ ID NO: 107 - protein, 19 aa, Artificial Sequence
  Synthetic
RIRSKYNNYATYYADAVKD

SEQ ID NO: 108 - protein, 14 aa, Artificial Sequence
  Synthetic
AGNFGSSYISYWAY

SEQ ID NO: 109 - protein, 14 aa, Artificial Sequence
  Synthetic
GSSTGAVTSGNYPN

SEQ ID NO: 110 - protein, 7 aa, Artificial Sequence
  Synthetic
GTKFLAP

SEQ ID NO: 111 - protein, 9 aa, Artificial Sequence
  Synthetic
VLWYSNRWV

SEQ ID NO: 112 - protein, 5 aa, Artificial Sequence
  Synthetic
KYAIN

SEQ ID NO: 113 - protein, 19 aa, Artificial Sequence
  Synthetic
RIRSKYNNYATYYADAVKD

SEQ ID NO: 114 - protein, 14 aa, Artificial Sequence
  Synthetic
AGNFGSSYISYWAY

SEQ ID NO: 115 - protein, 14 aa, Artificial Sequence
  Synthetic
GSSTGAVTSGNYPN

SEQ ID NO: 116 - protein, 7 aa, Artificial Sequence
  Synthetic
GTKFLAP

SEQ ID NO: 117 - protein, 9 aa, Artificial Sequence
  Synthetic
VLWYSNRWV

SEQ ID NO: 118 - protein, 5 aa, Artificial Sequence
  Synthetic
KYAIN

SEQ ID NO: 119 - protein, 19 aa, Artificial Sequence
  Synthetic
RIRSKYNNYATYYADAVKD

SEQ ID NO: 120 - protein, 14 aa, Artificial Sequence
  Synthetic
AGNFGSSYISYWAY

SEQ ID NO: 121 - protein, 14 aa, Artificial Sequence
  Synthetic
GSSTGAVTSGNYPN

SEQ ID NO: 122 - protein, 7 aa, Artificial Sequence
  Synthetic
GTKFLAP

SEQ ID NO: 123 - protein, 9 aa, Artificial Sequence
  Synthetic
VLWYSNRWV

SEQ ID NO: 124 - protein, 5 aa, Artificial Sequence
  Synthetic
KYAIN

SEQ ID NO: 125 - protein, 19 aa, Artificial Sequence
  Synthetic
RIRSKYNNYATYYADAVKD

SEQ ID NO: 126 - protein, 14 aa, Artificial Sequence
  Synthetic
AGNFGSSYISYWAY

SEQ ID NO: 127 - protein, 14 aa, Artificial Sequence
  Synthetic
GSSTGAVTSGNYPN

SEQ ID NO: 128 - protein, 7 aa, Artificial Sequence
  Synthetic
GTKFLAP

SEQ ID NO: 129 - protein, 9 aa, Artificial Sequence
  Synthetic
VLWYSNRWV

SEQ ID NO: 130 - protein, 5 aa, Artificial Sequence
  Synthetic
KYAMN

SEQ ID NO: 131 - protein, 19 aa, Artificial Sequence
  Synthetic
RIRSKYNNYATYYAEAVKG

SEQ ID NO: 132 - protein, 14 aa, Artificial Sequence
  Synthetic
NENIGTSYISYWAY

SEQ ID NO: 133 - protein, 14 aa, Artificial Sequence
  Synthetic
GSSTGAVTSGNYPN

SEQ ID NO: 134 - protein, 7 aa, Artificial Sequence
  Synthetic
GTKFLAP

SEQ ID NO: 135 - protein, 9 aa, Artificial Sequence
  Synthetic
VLWYSNRWV

SEQ ID NO: 136 - protein, 5 aa, Artificial Sequence
  Synthetic
KYAMN

SEQ ID NO: 137 - protein, 19 aa, Artificial Sequence
  Synthetic
RIRSKYNNYATYYAEAVKG

SEQ ID NO: 138 - protein, 14 aa, Artificial Sequence
  Synthetic
NENIGTSYISYWAY

SEQ ID NO: 139 - protein, 14 aa, Artificial Sequence
  Synthetic
GSSTGAVTSGNYPN

SEQ ID NO: 140 - protein, 7 aa, Artificial Sequence
  Synthetic
GTKFLAP

SEQ ID NO: 141 - protein, 9 aa, Artificial Sequence
  Synthetic
VLWYSNRWV

SEQ ID NO: 142 - protein, 5 aa, Artificial Sequence
  Synthetic
KYAMN

SEQ ID NO: 143 - protein, 19 aa, Artificial Sequence
  Synthetic
RIRSKYNNYATYYAEAVKG

SEQ ID NO: 144 - protein, 14 aa, Artificial Sequence
  Synthetic
NENIGTSYISYWAY

SEQ ID NO: 145 - protein, 14 aa, Artificial Sequence
  Synthetic
GSSTGAVTSGNYPN

SEQ ID NO: 146 - protein, 7 aa, Artificial Sequence
  Synthetic
GTKFLAP

SEQ ID NO: 147 - protein, 9 aa, Artificial Sequence
  Synthetic
VLWYSNRWV

SEQ ID NO: 148 - protein, 5 aa, Artificial Sequence
  Synthetic
KYAMN

SEQ ID NO: 149 - protein, 19 aa, Artificial Sequence
  Synthetic
RIRSKYNNYATYYAEAVKG

SEQ ID NO: 150 - protein, 14 aa, Artificial Sequence
  Synthetic
NENIGTSYISYWAY

SEQ ID NO: 151 - protein, 14 aa, Artificial Sequence
  Synthetic
GSSTGAVTSGNYPN

SEQ ID NO: 152 - protein, 7 aa, Artificial Sequence
  Synthetic
GTKFLAP

SEQ ID NO: 153 - protein, 9 aa, Artificial Sequence
  Synthetic
VLWYSNRWV

SEQ ID NO: 154 - protein, 5 aa, Artificial Sequence
  Synthetic
KYAIN

SEQ ID NO: 155 - protein, 19 aa, Artificial Sequence
  Synthetic
RIRSKYNNYATYYADAVKD

SEQ ID NO: 156 - protein, 14 aa, Artificial Sequence
  Synthetic
NANFGTSYISYFAY

SEQ ID NO: 157 - protein, 14 aa, Artificial Sequence
  Synthetic
GSSTGAVTSGNYPN

SEQ ID NO: 158 - protein, 7 aa, Artificial Sequence
  Synthetic
GTKFLAP

SEQ ID NO: 159 - protein, 9 aa, Artificial Sequence
  Synthetic
VLWYSNRWV

SEQ ID NO: 160 - protein, 5 aa, Artificial Sequence
  Synthetic
KYAIN

SEQ ID NO: 161 - protein, 19 aa, Artificial Sequence
  Synthetic
RIRSKYNNYATYYADAVKD

SEQ ID NO: 162 - protein, 14 aa, Artificial Sequence
  Synthetic
NANFGTSYISYFAY

SEQ ID NO: 163 - protein, 14 aa, Artificial Sequence
  Synthetic
GSSTGAVTSGNYPN

SEQ ID NO: 164 - protein, 7 aa, Artificial Sequence
  Synthetic
GTKFLAP

SEQ ID NO: 165 - protein, 9 aa, Artificial Sequence
  Synthetic
VLWYSNRWV

SEQ ID NO: 166 - protein, 5 aa, Artificial Sequence
  Synthetic
KYAIN

SEQ ID NO: 167 - protein, 19 aa, Artificial Sequence
  Synthetic
RIRSKYNNYATYYADAVKD

SEQ ID NO: 168 - protein, 14 aa, Artificial Sequence
  Synthetic
NANFGTSYISYFAY

SEQ ID NO: 169 - protein, 14 aa, Artificial Sequence
  Synthetic
GSSTGAVTSGNYPN

SEQ ID NO: 170 - protein, 7 aa, Artificial Sequence
  Synthetic
GTKFLAP

SEQ ID NO: 171 - protein, 9 aa, Artificial Sequence
  Synthetic
VLWYSNRWV

SEQ ID NO: 172 - protein, 5 aa, Artificial Sequence
  Synthetic
KYAIN

SEQ ID NO: 173 - protein, 19 aa, Artificial Sequence
  Synthetic
RIRSKYNNYATYYADAVKD

SEQ ID NO: 174 - protein, 14 aa, Artificial Sequence
  Synthetic
NANFGTSYISYFAY

SEQ ID NO: 175 - protein, 14 aa, Artificial Sequence
  Synthetic
GSSTGAVTSGNYPN

SEQ ID NO: 176 - protein, 7 aa, Artificial Sequence
  Synthetic
GTKFLAP

SEQ ID NO: 177 - protein, 9 aa, Artificial Sequence
  Synthetic
VLWYSNRWV

SEQ ID NO: 178 - protein, 5 aa, Artificial Sequence
  Synthetic
KYAMN

SEQ ID NO: 179 - protein, 19 aa, Artificial Sequence
  Synthetic
RIRSKYNNYATYYADAVKD

SEQ ID NO: 180 - protein, 14 aa, Artificial Sequence
  Synthetic
AGNFGSSYISYFAY

SEQ ID NO: 181 - protein, 14 aa, Artificial Sequence
  Synthetic
GSSTGAVTSGNYPN

SEQ ID NO: 182 - protein, 7 aa, Artificial Sequence
  Synthetic
GTKFLAP

SEQ ID NO: 183 - protein, 9 aa, Artificial Sequence
  Synthetic
VLYYSNRWV

SEQ ID NO: 184 - protein, 5 aa, Artificial Sequence
  Synthetic
KYAMN

SEQ ID NO: 185 - protein, 19 aa, Artificial Sequence
  Synthetic
RIRSKYNNYATYYADAVKD

SEQ ID NO: 186 - protein, 14 aa, Artificial Sequence
  Synthetic
AGNFGSSYISYFAY

SEQ ID NO: 187 - protein, 14 aa, Artificial Sequence
  Synthetic
GSSTGAVTSGNYPN

SEQ ID NO: 188 - protein, 7 aa, Artificial Sequence
  Synthetic
GTKFLAP

SEQ ID NO: 189 - protein, 9 aa, Artificial Sequence
  Synthetic
VLYYSNRWV

SEQ ID NO: 190 - protein, 5 aa, Artificial Sequence
  Synthetic
KYAMN

SEQ ID NO: 191 - protein, 19 aa, Artificial Sequence
  Synthetic
RIRSKYNNYATYYADAVKD

SEQ ID NO: 192 - protein, 14 aa, Artificial Sequence
  Synthetic
AGNFGSSYISYFAY

SEQ ID NO: 193 - protein, 14 aa, Artificial Sequence
  Synthetic
GSSTGAVTSGNYPN

SEQ ID NO: 194 - protein, 7 aa, Artificial Sequence
  Synthetic
GTKFLAP

SEQ ID NO: 195 - protein, 9 aa, Artificial Sequence
  Synthetic
VLYYSNRWV

SEQ ID NO: 196 - protein, 5 aa, Artificial Sequence
  Synthetic
KYAMN

SEQ ID NO: 197 - protein, 19 aa, Artificial Sequence
  Synthetic
RIRSKYNNYATYYADAVKD

SEQ ID NO: 198 - protein, 14 aa, Artificial Sequence
  Synthetic
AGNFGSSYISYFAY

SEQ ID NO: 199 - protein, 14 aa, Artificial Sequence
  Synthetic
GSSTGAVTSGNYPN

SEQ ID NO: 200 - protein, 7 aa, Artificial Sequence
  Synthetic
GTKFLAP

SEQ ID NO: 201 - protein, 9 aa, Artificial Sequence
  Synthetic
VLYYSNRWV

SEQ ID NO: 202 - protein, 5 aa, Artificial Sequence
  Synthetic
KYAMN

SEQ ID NO: 203 - protein, 19 aa, Artificial Sequence
  Synthetic
RIRSKYNNYATYYADSVKD

SEQ ID NO: 204 - protein, 14 aa, Artificial Sequence
  Synthetic
HGNFGNSYISYWAY

SEQ ID NO: 205 - protein, 14 aa, Artificial Sequence
  Synthetic
GSSTGAVTSGNYPN

SEQ ID NO: 206 - protein, 7 aa, Artificial Sequence
  Synthetic
GTKFLAP

SEQ ID NO: 207 - protein, 9 aa, Artificial Sequence
  Synthetic
VLWYSNRWV

SEQ ID NO: 208 - protein, 5 aa, Artificial Sequence
  Synthetic
KYAMN

SEQ ID NO: 209 - protein, 19 aa, Artificial Sequence
  Synthetic
RIRSKYNNYATYYADSVKD

SEQ ID NO: 210 - protein, 14 aa, Artificial Sequence
  Synthetic
HGNFGNSYISYWAY

SEQ ID NO: 211 - protein, 14 aa, Artificial Sequence
  Synthetic
GSSTGAVTSGNYPN

SEQ ID NO: 212 - protein, 7 aa, Artificial Sequence
  Synthetic
GTKFLAP

SEQ ID NO: 213 - protein, 9 aa, Artificial Sequence
  Synthetic
VLWYSNRWV

SEQ ID NO: 214 - protein, 5 aa, Artificial Sequence
  Synthetic
KYAMN

SEQ ID NO: 215 - protein, 19 aa, Artificial Sequence
  Synthetic
RIRSKYNNYATYYADSVKD

SEQ ID NO: 216 - protein, 14 aa, Artificial Sequence
  Synthetic
HGNFGNSYISYWAY

SEQ ID NO: 217 - protein, 14 aa, Artificial Sequence
  Synthetic
GSSTGAVTSGNYPN

SEQ ID NO: 218 - protein, 7 aa, Artificial Sequence
  Synthetic
GTKFLAP

SEQ ID NO: 219 - protein, 9 aa, Artificial Sequence
  Synthetic
VLWYSNRWV

SEQ ID NO: 220 - protein, 5 aa, Artificial Sequence
  Synthetic
KYAMN

SEQ ID NO: 221 - protein, 19 aa, Artificial Sequence
  Synthetic
RIRSKYNNYATYYADSVKD

SEQ ID NO: 222 - protein, 14 aa, Artificial Sequence
  Synthetic
HGNFGNSYISYWAY

SEQ ID NO: 223 - protein, 14 aa, Artificial Sequence
  Synthetic
GSSTGAVTSGNYPN

SEQ ID NO: 224 - protein, 7 aa, Artificial Sequence
  Synthetic
GTKFLAP

SEQ ID NO: 225 - protein, 9 aa, Artificial Sequence
  Synthetic
VLWYSNRWV

SEQ ID NO: 226 - protein, 5 aa, Artificial Sequence
  Synthetic
NHIIH

SEQ ID NO: 227 - protein, 17 aa, Artificial Sequence
  Synthetic
YINPYPGYHAYNEKFQG

SEQ ID NO: 228 - protein, 12 aa, Artificial Sequence
  Synthetic
DGYYRDTDVLDY

SEQ ID NO: 229 - protein, 11 aa, Artificial Sequence
  Synthetic
QASQDISNYLN

SEQ ID NO: 230 - protein, 7 aa, Artificial Sequence
  Synthetic
YTSRLHT

SEQ ID NO: 231 - protein, 9 aa, Artificial Sequence
  Synthetic
QQGNTLPWT

SEQ ID NO: 232 - protein, 5 aa, Artificial Sequence
  Synthetic
NHIIH

SEQ ID NO: 233 - protein, 17 aa, Artificial Sequence
  Synthetic
YINPYPGYHAYNEKFQG

SEQ ID NO: 234 - protein, 12 aa, Artificial Sequence
  Synthetic
DGYYRDTDVLDY

SEQ ID NO: 235 - protein, 11 aa, Artificial Sequence
  Synthetic
QASQDISNYLN

SEQ ID NO: 236 - protein, 7 aa, Artificial Sequence
  Synthetic
YTSRLHT

SEQ ID NO: 237 - protein, 9 aa, Artificial Sequence
  Synthetic
QQGNTLPWT

SEQ ID NO: 238 - protein, 5 aa, Artificial Sequence
  Synthetic
NHIIH

SEQ ID NO: 239 - protein, 17 aa, Artificial Sequence
  Synthetic
YINPYPGYHAYNEKFQG

SEQ ID NO: 240 - protein, 12 aa, Artificial Sequence
  Synthetic
DGYYRDTDVLDY

SEQ ID NO: 241 - protein, 11 aa, Artificial Sequence
  Synthetic
QASQDISNYLN

SEQ ID NO: 242 - protein, 7 aa, Artificial Sequence
  Synthetic
YTSRLHT

SEQ ID NO: 243 - protein, 9 aa, Artificial Sequence
  Synthetic
QQGNTLPWT

SEQ ID NO: 244 - protein, 5 aa, Artificial Sequence
  Synthetic
NHIIH

SEQ ID NO: 245 - protein, 17 aa, Artificial Sequence
  Synthetic
YINPYPGYHAYNEKFQG

SEQ ID NO: 246 - protein, 12 aa, Artificial Sequence
  Synthetic
DGYYRDTDVLDY

SEQ ID NO: 247 - protein, 11 aa, Artificial Sequence
  Synthetic
QASQDISNYLN

SEQ ID NO: 248 - protein, 7 aa, Artificial Sequence
  Synthetic
YTSRLHT

SEQ ID NO: 249 - protein, 9 aa, Artificial Sequence
  Synthetic
QQGNTLPWT

SEQ ID NO: 250 - protein, 5 aa, Artificial Sequence
  Synthetic
HYAMS

SEQ ID NO: 251 - protein, 17 aa, Artificial Sequence
  Synthetic
AVSGGGDKTLYADAVKG

SEQ ID NO: 252 - protein, 10 aa, Artificial Sequence
  Synthetic
LRGFYYGMDV

SEQ ID NO: 253 - protein, 16 aa, Artificial Sequence
  Synthetic
RSSQSLLHSNKYNYLD

SEQ ID NO: 254 - protein, 7 aa, Artificial Sequence
  Synthetic
LGSNRAS

SEQ ID NO: 255 - protein, 10 aa, Artificial Sequence
  Synthetic
MQALQTPPIT

SEQ ID NO: 256 - protein, 5 aa, Artificial Sequence
  Synthetic
HYAMS

SEQ ID NO: 257 - protein, 17 aa, Artificial Sequence
  Synthetic
AVSGGGDKTLYADAVKG

SEQ ID NO: 258 - protein, 10 aa, Artificial Sequence
  Synthetic
LRGFYYGMDV

SEQ ID NO: 259 - protein, 16 aa, Artificial Sequence
  Synthetic
RSSQSLLHSNKYNYLD

SEQ ID NO: 260 - protein, 7 aa, Artificial Sequence
  Synthetic
LGSNRAS

SEQ ID NO: 261 - protein, 10 aa, Artificial Sequence
  Synthetic
MQALQTPPIT

SEQ ID NO: 262 - protein, 5 aa, Artificial Sequence
  Synthetic
SYGMH

SEQ ID NO: 263 - protein, 17 aa, Artificial Sequence
  Synthetic
VISYEGSNKYYAESVKG

SEQ ID NO: 264 - protein, 13 aa, Artificial Sequence
  Synthetic
DRGTIFGNYGLEV

SEQ ID NO: 265 - protein, 16 aa, Artificial Sequence
  Synthetic
RSSQSLLHKNAFNYLD

SEQ ID NO: 266 - protein, 7 aa, Artificial Sequence
  Synthetic
LGSNRAS

SEQ ID NO: 267 - protein, 9 aa, Artificial Sequence
  Synthetic
MQALQTPFT

SEQ ID NO: 268 - protein, 5 aa, Artificial Sequence
  Synthetic
SYGMH

SEQ ID NO: 269 - protein, 17 aa, Artificial Sequence
  Synthetic
VISYEGSNKYYAESVKG

SEQ ID NO: 270 - protein, 13 aa, Artificial Sequence
  Synthetic
DRGTIFGNYGLEV

SEQ ID NO: 271 - protein, 16 aa, Artificial Sequence
  Synthetic
RSSQSLLHKNAFNYLD

SEQ ID NO: 272 - protein, 7 aa, Artificial Sequence
  Synthetic
LGSNRAS

SEQ ID NO: 273 - protein, 9 aa, Artificial Sequence
  Synthetic
MQALQTPFT

SEQ ID NO: 274 - protein, 5 aa, Artificial Sequence
  Synthetic
NYGMN

SEQ ID NO: 275 - protein, 17 aa, Artificial Sequence
  Synthetic
WINTYTGEPTYADKFQG

SEQ ID NO: 276 - protein, 13 aa, Artificial Sequence
  Synthetic
WSWSDGYYVYFDY

SEQ ID NO: 277 - protein, 17 aa, Artificial Sequence
  Synthetic
KSSQSVLDSSTNKNSLA

SEQ ID NO: 278 - protein, 7 aa, Artificial Sequence
  Synthetic
WASTRES

SEQ ID NO: 279 - protein, 9 aa, Artificial Sequence
  Synthetic
QQSAHFPIT

SEQ ID NO: 280 - protein, 5 aa, Artificial Sequence
  Synthetic
NYGMN

SEQ ID NO: 281 - protein, 17 aa, Artificial Sequence
  Synthetic
WINTYTGEPTYADKFQG

SEQ ID NO: 282 - protein, 13 aa, Artificial Sequence
  Synthetic
WSWSDGYYVYFDY

SEQ ID NO: 283 - protein, 17 aa, Artificial Sequence
  Synthetic
KSSQSVLDSSTNKNSLA

SEQ ID NO: 284 - protein, 7 aa, Artificial Sequence
  Synthetic
WASTRES

SEQ ID NO: 285 - protein, 9 aa, Artificial Sequence
  Synthetic
QQSAHFPIT

SEQ ID NO: 286 - protein, 5 aa, Artificial Sequence
  Synthetic
NYGMN

SEQ ID NO: 287 - protein, 17 aa, Artificial Sequence
  Synthetic
WINTYTGEPTYADKFQG

SEQ ID NO: 288 - protein, 13 aa, Artificial Sequence
  Synthetic
WSWSDGYYVYFDY

SEQ ID NO: 289 - protein, 17 aa, Artificial Sequence
  Synthetic
KSSQSVLDSSTNKNSLA

SEQ ID NO: 290 - protein, 7 aa, Artificial Sequence
  Synthetic
WASTRES

SEQ ID NO: 291 - protein, 9 aa, Artificial Sequence
  Synthetic
QQSAHFPIT

SEQ ID NO: 292 - protein, 5 aa, Artificial Sequence
  Synthetic
NYGMN

SEQ ID NO: 293 - protein, 17 aa, Artificial Sequence
  Synthetic
WINTYTGEPTYADKFQG

SEQ ID NO: 294 - protein, 13 aa, Artificial Sequence
  Synthetic
WSWSDGYYVYFDY

SEQ ID NO: 295 - protein, 17 aa, Artificial Sequence
  Synthetic
KSSQSVLDSSTNKNSLA

SEQ ID NO: 296 - protein, 7 aa, Artificial Sequence
  Synthetic
WASTRES

SEQ ID NO: 297 - protein, 9 aa, Artificial Sequence
  Synthetic
QQSAHFPIT

SEQ ID NO: 298 - protein, 5 aa, Artificial Sequence
  Synthetic
NYGMN

SEQ ID NO: 299 - protein, 17 aa, Artificial Sequence
  Synthetic
WINTYTGEPTYADKFQG

SEQ ID NO: 300 - protein, 13 aa, Artificial Sequence
  Synthetic
WSWSDGYYVYFDY

SEQ ID NO: 301 - protein, 17 aa, Artificial Sequence
  Synthetic
KSSQSVLDSSTNKNSLA

SEQ ID NO: 302 - protein, 7 aa, Artificial Sequence
  Synthetic
WASTRES

SEQ ID NO: 303 - protein, 9 aa, Artificial Sequence
  Synthetic
QQSAHFPIT

SEQ ID NO: 304 - protein, 5 aa, Artificial Sequence
  Synthetic
NYGMN

SEQ ID NO: 305 - protein, 17 aa, Artificial Sequence
  Synthetic
WINTYTGEPTYADKFQG

SEQ ID NO: 306 - protein, 13 aa, Artificial Sequence
  Synthetic
WSWSDGYYVYFDY

SEQ ID NO: 307 - protein, 17 aa, Artificial Sequence
  Synthetic
KSSQSVLDSSTNKNSLA

SEQ ID NO: 308 - protein, 7 aa, Artificial Sequence
  Synthetic
WASTRES

SEQ ID NO: 309 - protein, 9 aa, Artificial Sequence
  Synthetic
QQSAHFPIT

SEQ ID NO: 310 - protein, 5 aa, Artificial Sequence
  Synthetic
TYAMS

SEQ ID NO: 311 - protein, 17 aa, Artificial Sequence
  Synthetic
AISGSGGRTFYAESVEG

SEQ ID NO: 312 - protein, 11 aa, Artificial Sequence
  Synthetic
HDYSNYPYFDY

SEQ ID NO: 313 - protein, 12 aa, Artificial Sequence
  Synthetic
RASQSVRSTYLA

SEQ ID NO: 314 - protein, 7 aa, Artificial Sequence
  Synthetic
GASSRAT

SEQ ID NO: 315 - protein, 9 aa, Artificial Sequence
  Synthetic
QQYGDLPFT

SEQ ID NO: 316 - protein, 5 aa, Artificial Sequence
  Synthetic
TYAMS

SEQ ID NO: 317 - protein, 17 aa, Artificial Sequence
  Synthetic
AISGSGGRTFYAESVEG

SEQ ID NO: 318 - protein, 11 aa, Artificial Sequence
  Synthetic
HDYSNYPYFDY

SEQ ID NO: 319 - protein, 12 aa, Artificial Sequence
  Synthetic
RASQSVRSTYLA

SEQ ID NO: 320 - protein, 7 aa, Artificial Sequence
  Synthetic
GASSRAT

SEQ ID NO: 321 - protein, 9 aa, Artificial Sequence
  Synthetic
QQYGDLPFT

SEQ ID NO: 322 - protein, 5 aa, Artificial Sequence
  Synthetic
SYGMH

SEQ ID NO: 323 - protein, 17 aa, Artificial Sequence
  Synthetic
FIWYEGSNKYYAESVKD

SEQ ID NO: 324 - protein, 16 aa, Artificial Sequence
  Synthetic
RAGIIGTIGYYYGMDV

SEQ ID NO: 325 - protein, 11 aa, Artificial Sequence
  Synthetic
SGDRLGEKYTS

SEQ ID NO: 326 - protein, 7 aa, Artificial Sequence
  Synthetic
QDTKRPS

SEQ ID NO: 327 - protein, 9 aa, Artificial Sequence
  Synthetic
QAWESSTVV

SEQ ID NO: 328 - protein, 5 aa, Artificial Sequence
  Synthetic
SYGMH

SEQ ID NO: 329 - protein, 17 aa, Artificial Sequence
  Synthetic
FIWYEGSNKYYAESVKD

SEQ ID NO: 330 - protein, 16 aa, Artificial Sequence
  Synthetic
RAGIIGTIGYYYGMDV

SEQ ID NO: 331 - protein, 11 aa, Artificial Sequence
  Synthetic
SGDRLGEKYTS

SEQ ID NO: 332 - protein, 7 aa, Artificial Sequence
  Synthetic
QDTKRPS

SEQ ID NO: 333 - protein, 9 aa, Artificial Sequence
  Synthetic
QAWESSTVV

SEQ ID NO: 334 - protein, 5 aa, Artificial Sequence
  Synthetic
NYWMN

SEQ ID NO: 335 - protein, 17 aa, Artificial Sequence
  Synthetic
NIAYGVKGTNYNQKFQG

SEQ ID NO: 336 - protein, 8 aa, Artificial Sequence
  Synthetic
RYFYVMDY

SEQ ID NO: 337 - protein, 11 aa, Artificial Sequence
  Synthetic
RASQDISNYLN

SEQ ID NO: 338 - protein, 7 aa, Artificial Sequence
  Synthetic
YTSRLHS

SEQ ID NO: 339 - protein, 9 aa, Artificial Sequence
  Synthetic
VQYAQFPLT

SEQ ID NO: 340 - protein, 5 aa, Artificial Sequence
  Synthetic
NYWMN

SEQ ID NO: 341 - protein, 17 aa, Artificial Sequence
  Synthetic
NIAYGVKGTNYNQKFQG

SEQ ID NO: 342 - protein, 8 aa, Artificial Sequence
  Synthetic
RYFYVMDY

SEQ ID NO: 343 - protein, 11 aa, Artificial Sequence
  Synthetic
RASQDISNYLN

SEQ ID NO: 344 - protein, 7 aa, Artificial Sequence
  Synthetic
YTSRLHS

SEQ ID NO: 345 - protein, 9 aa, Artificial Sequence
  Synthetic
VQYAQFPLT

SEQ ID NO: 346 - protein, 5 aa, Artificial Sequence
  Synthetic
NYWMN

SEQ ID NO: 347 - protein, 17 aa, Artificial Sequence
  Synthetic
NIAYGVKGTNYNQKFQG

SEQ ID NO: 348 - protein, 8 aa, Artificial Sequence
  Synthetic
RYFYVMDY

SEQ ID NO: 349 - protein, 11 aa, Artificial Sequence
  Synthetic
RASQDISNYLN

SEQ ID NO: 350 - protein, 7 aa, Artificial Sequence
  Synthetic
YTSRLHS

SEQ ID NO: 351 - protein, 9 aa, Artificial Sequence
  Synthetic
VQYAQFPLT

SEQ ID NO: 352 - protein, 5 aa, Artificial Sequence
  Synthetic
SYPIN

SEQ ID NO: 353 - protein, 16 aa, Artificial Sequence
  Synthetic
VIWTGGGTNYASSVKG

SEQ ID NO: 354 - protein, 15 aa, Artificial Sequence
  Synthetic
SRGVYDFDGRGAMDY

SEQ ID NO: 355 - protein, 17 aa, Artificial Sequence
  Synthetic
KSSQSLLYSSNQKNYFA

SEQ ID NO: 356 - protein, 7 aa, Artificial Sequence
  Synthetic
WASTRES

SEQ ID NO: 357 - protein, 9 aa, Artificial Sequence
  Synthetic
QQYYSYPYT

SEQ ID NO: 358 - protein, 5 aa, Artificial Sequence
  Synthetic
SYPIN

SEQ ID NO: 359 - protein, 16 aa, Artificial Sequence
  Synthetic
VIWTGGGTNYASSVKG

SEQ ID NO: 360 - protein, 15 aa, Artificial Sequence
  Synthetic
SRGVYDFDGRGAMDY

SEQ ID NO: 361 - protein, 17 aa, Artificial Sequence
  Synthetic
KSSQSLLYSSNQKNYFA

SEQ ID NO: 362 - protein, 7 aa, Artificial Sequence
  Synthetic
WASTRES

SEQ ID NO: 363 - protein, 9 aa, Artificial Sequence
  Synthetic
QQYYSYPYT

SEQ ID NO: 364 - protein, 5 aa, Artificial Sequence
  Synthetic
GYYMH

SEQ ID NO: 365 - protein, 17 aa, Artificial Sequence
  Synthetic
WINPNSGGTKYAQKFQG

SEQ ID NO: 366 - protein, 16 aa, Artificial Sequence
  Synthetic
DRITVAGTYYYYGMDV

SEQ ID NO: 367 - protein, 11 aa, Artificial Sequence
  Synthetic
RASQGVNNWLA

SEQ ID NO: 368 - protein, 7 aa, Artificial Sequence
  Synthetic
TASSLQS

SEQ ID NO: 369 - protein, 9 aa, Artificial Sequence
  Synthetic
QQANSFPIT

SEQ ID NO: 370 - protein, 5 aa, Artificial Sequence
  Synthetic
GYYMH

SEQ ID NO: 371 - protein, 17 aa, Artificial Sequence
  Synthetic
WINPNSGGTKYAQKFQG

SEQ ID NO: 372 - protein, 16 aa, Artificial Sequence
  Synthetic
DRITVAGTYYYYGMDV

SEQ ID NO: 373 - protein, 11 aa, Artificial Sequence
  Synthetic
RASQGVNNWLA

SEQ ID NO: 374 - protein, 7 aa, Artificial Sequence
  Synthetic
TASSLQS

SEQ ID NO: 375 - protein, 9 aa, Artificial Sequence
  Synthetic
QQANSFPIT

SEQ ID NO: 376 - protein, 5 aa, Artificial Sequence
  Synthetic
NYYMH

SEQ ID NO: 377 - protein, 17 aa, Artificial Sequence
  Synthetic
WINPTSGGANYAQKFQG

SEQ ID NO: 378 - protein, 13 aa, Artificial Sequence
  Synthetic
ESHAIQEGIWFDY

SEQ ID NO: 379 - protein, 11 aa, Artificial Sequence
  Synthetic
RASQSISNYLN

SEQ ID NO: 380 - protein, 7 aa, Artificial Sequence
  Synthetic
DASSLQS

SEQ ID NO: 381 - protein, 9 aa, Artificial Sequence
  Synthetic
QQSYSFPLT

SEQ ID NO: 382 - protein, 5 aa, Artificial Sequence
  Synthetic
NYYMH

SEQ ID NO: 383 - protein, 17 aa, Artificial Sequence
  Synthetic
WINPTSGGANYAQKFQG

SEQ ID NO: 384 - protein, 13 aa, Artificial Sequence
  Synthetic
ESHAIQEGIWFDY

SEQ ID NO: 385 - protein, 11 aa, Artificial Sequence
  Synthetic
RASQSISNYLN

SEQ ID NO: 386 - protein, 7 aa, Artificial Sequence
  Synthetic
DASSLQS

SEQ ID NO: 387 - protein, 9 aa, Artificial Sequence
  Synthetic
QQSYSFPLT

SEQ ID NO: 388 - protein, 5 aa, Artificial Sequence
  Synthetic
GYYMH

SEQ ID NO: 389 - protein, 17 aa, Artificial Sequence
  Synthetic
WINPNSGETNYAQKFQG

SEQ ID NO: 390 - protein, 20 aa, Artificial Sequence
  Synthetic
DALIVVAPVTRDYYYYGMDV

SEQ ID NO: 391 - protein, 12 aa, Artificial Sequence
  Synthetic
RASQSVSSSYLA

SEQ ID NO: 392 - protein, 7 aa, Artificial Sequence
  Synthetic
GASSRAT

SEQ ID NO: 393 - protein, 9 aa, Artificial Sequence
  Synthetic
QQYGSSPLT

SEQ ID NO: 394 - protein, 5 aa, Artificial Sequence
  Synthetic
GYYMH

SEQ ID NO: 395 - protein, 17 aa, Artificial Sequence
  Synthetic
WINPNSGETNYAQKFQG

SEQ ID NO: 396 - protein, 20 aa, Artificial Sequence
  Synthetic
DALIVVAPVTRDYYYYGMDV

SEQ ID NO: 397 - protein, 12 aa, Artificial Sequence
  Synthetic
RASQSVSSSYLA

SEQ ID NO: 398 - protein, 7 aa, Artificial Sequence
  Synthetic
GASSRAT

SEQ ID NO: 399 - protein, 9 aa, Artificial Sequence
  Synthetic
QQYGSSPLT

SEQ ID NO: 400 - protein, 5 aa, Artificial Sequence
  Synthetic
SSWMN

SEQ ID NO: 401 - protein, 17 aa, Artificial Sequence
  Synthetic
RIYPGDADAKYNAKFKG

SEQ ID NO: 402 - protein, 11 aa, Artificial Sequence
  Synthetic
STMIATGAMDY

SEQ ID NO: 403 - protein, 11 aa, Artificial Sequence
  Synthetic
KASQDVSTAVA

SEQ ID NO: 404 - protein, 7 aa, Artificial Sequence
  Synthetic
SASYRYT

SEQ ID NO: 405 - protein, 10 aa, Artificial Sequence
  Synthetic
QQHYSTPPYT

SEQ ID NO: 406 - protein, 5 aa, Artificial Sequence
  Synthetic
SSWMN

SEQ ID NO: 407 - protein, 17 aa, Artificial Sequence
  Synthetic
RIYPGDADAKYNAKFKG

SEQ ID NO: 408 - protein, 11 aa, Artificial Sequence
  Synthetic
STMIATGAMDY

SEQ ID NO: 409 - protein, 11 aa, Artificial Sequence
  Synthetic
KASQDVSTAVA

SEQ ID NO: 410 - protein, 7 aa, Artificial Sequence
  Synthetic
SASYRYT

SEQ ID NO: 411 - protein, 10 aa, Artificial Sequence
  Synthetic
QQHYSTPPYT

SEQ ID NO: 412 - protein, 5 aa, Artificial Sequence
  Synthetic
SSWMN

SEQ ID NO: 413 - protein, 17 aa, Artificial Sequence
  Synthetic
RIYPGDADAKYNAKFKG

SEQ ID NO: 414 - protein, 11 aa, Artificial Sequence
  Synthetic
STMIATGAMDY

SEQ ID NO: 415 - protein, 11 aa, Artificial Sequence
  Synthetic
KASQDVSTAVA

SEQ ID NO: 416 - protein, 7 aa, Artificial Sequence
  Synthetic
SASYRYT

SEQ ID NO: 417 - protein, 10 aa, Artificial Sequence
  Synthetic
QQHYSTPPYT

SEQ ID NO: 418 - protein, 5 aa, Artificial Sequence
  Synthetic
SYYWS

SEQ ID NO: 419 - protein, 16 aa, Artificial Sequence
  Synthetic
YVYYSGTTNYNPSLKS

SEQ ID NO: 420 - protein, 10 aa, Artificial Sequence
  Synthetic
IAVTGFYFDY

SEQ ID NO: 421 - protein, 12 aa, Artificial Sequence
  Synthetic
RASQRVNNNYLA

SEQ ID NO: 422 - protein, 7 aa, Artificial Sequence
  Synthetic
GASSRAT

SEQ ID NO: 423 - protein, 9 aa, Artificial Sequence
  Synthetic
QQYDRSPLT

SEQ ID NO: 424 - protein, 5 aa, Artificial Sequence
  Synthetic
SYYWS

SEQ ID NO: 425 - protein, 16 aa, Artificial Sequence
  Synthetic
YVYYSGTTNYNPSLKS

SEQ ID NO: 426 - protein, 10 aa, Artificial Sequence
  Synthetic
IAVTGFYFDY

SEQ ID NO: 427 - protein, 12 aa, Artificial Sequence
  Synthetic
RASQRVNNNYLA

SEQ ID NO: 428 - protein, 7 aa, Artificial Sequence
  Synthetic
GASSRAT

SEQ ID NO: 429 - protein, 9 aa, Artificial Sequence
  Synthetic
QQYDRSPLT

SEQ ID NO: 430 - protein, 5 aa, Artificial Sequence
  Synthetic
NYGMH

SEQ ID NO: 431 - protein, 17 aa, Artificial Sequence
  Synthetic
VIWYDGSDKYYADSVRG

SEQ ID NO: 432 - protein, 15 aa, Artificial Sequence
  Synthetic
DGYDILTGNPRDFDY

SEQ ID NO: 433 - protein, 16 aa, Artificial Sequence
  Synthetic
RSSQSLVHSDGNTYLS

SEQ ID NO: 434 - protein, 7 aa, Artificial Sequence
  Synthetic
RISRRFS

SEQ ID NO: 435 - protein, 9 aa, Artificial Sequence
  Synthetic
MQSTHVPRT

SEQ ID NO: 436 - protein, 5 aa, Artificial Sequence
  Synthetic
NYGMH

SEQ ID NO: 437 - protein, 17 aa, Artificial Sequence
  Synthetic
VIWYDGSDKYYADSVRG

SEQ ID NO: 438 - protein, 15 aa, Artificial Sequence
  Synthetic
DGYDILTGNPRDFDY

SEQ ID NO: 439 - protein, 16 aa, Artificial Sequence
  Synthetic
RSSQSLVHSDGNTYLS

SEQ ID NO: 440 - protein, 7 aa, Artificial Sequence
  Synthetic
RISRRFS

SEQ ID NO: 441 - protein, 9 aa, Artificial Sequence
  Synthetic
MQSTHVPRT

SEQ ID NO: 442 - protein, 7 aa, Artificial Sequence
  Synthetic
NARMGVS

SEQ ID NO: 443 - protein, 16 aa, Artificial Sequence
  Synthetic
HIFSNDEKSYSTSLKN

SEQ ID NO: 444 - protein, 14 aa, Artificial Sequence
  Synthetic
IVGYGSGWYGFFDY

SEQ ID NO: 445 - protein, 11 aa, Artificial Sequence
  Synthetic
RASQGIRNDLG

SEQ ID NO: 446 - protein, 7 aa, Artificial Sequence
  Synthetic
AASTLQS

SEQ ID NO: 447 - protein, 9 aa, Artificial Sequence
  Synthetic
LQHNSYPLT

SEQ ID NO: 448 - protein, 7 aa, Artificial Sequence
  Synthetic
NARMGVS

SEQ ID NO: 449 - protein, 16 aa, Artificial Sequence
  Synthetic
HIFSNDEKSYSTSLKN

SEQ ID NO: 450 - protein, 14 aa, Artificial Sequence
  Synthetic
IVGYGSGWYGFFDY

SEQ ID NO: 451 - protein, 11 aa, Artificial Sequence
  Synthetic
RASQGIRNDLG

SEQ ID NO: 452 - protein, 7 aa, Artificial Sequence
  Synthetic
AASTLQS

SEQ ID NO: 453 - protein, 9 aa, Artificial Sequence
  Synthetic
LQHNSYPLT

SEQ ID NO: 454 - protein, 5 aa, Artificial Sequence
  Synthetic
NAWMS

SEQ ID NO: 455 - protein, 19 aa, Artificial Sequence
  Synthetic
RIRSRSYGGTTDYAAPVKG

SEQ ID NO: 456 - protein, 16 aa, Artificial Sequence
  Synthetic
PSYSGSYYNYFSVMDV

SEQ ID NO: 457 - protein, 11 aa, Artificial Sequence
  Synthetic
RTSQSISSYLN

SEQ ID NO: 458 - protein, 7 aa, Artificial Sequence
  Synthetic
AASSLQG

SEQ ID NO: 459 - protein, 9 aa, Artificial Sequence
  Synthetic
QQTYSMPFT

SEQ ID NO: 460 - protein, 5 aa, Artificial Sequence
  Synthetic
NAWMS

SEQ ID NO: 461 - protein, 19 aa, Artificial Sequence
  Synthetic
RIRSRSYGGTTDYAAPVKG

SEQ ID NO: 462 - protein, 16 aa, Artificial Sequence
  Synthetic
PSYSGSYYNYFSVMDV

SEQ ID NO: 463 - protein, 11 aa, Artificial Sequence
  Synthetic
RTSQSISSYLN

SEQ ID NO: 464 - protein, 7 aa, Artificial Sequence
  Synthetic
AASSLQG

SEQ ID NO: 465 - protein, 9 aa, Artificial Sequence
  Synthetic
QQTYSMPFT

SEQ ID NO: 466 - protein, 5 aa, Artificial Sequence
  Synthetic
SYAMS

SEQ ID NO: 467 - protein, 17 aa, Artificial Sequence
  Synthetic
AISGSGGGTYYAASVKG

SEQ ID NO: 468 - protein, 10 aa, Artificial Sequence
  Synthetic
GKGVHLGFDY

SEQ ID NO: 469 - protein, 11 aa, Artificial Sequence
  Synthetic
GGNNIGSKSVH

SEQ ID NO: 470 - protein, 7 aa, Artificial Sequence
  Synthetic
DDNDRPS

SEQ ID NO: 471 - protein, 11 aa, Artificial Sequence
  Synthetic
QVWDYSGQRQV

SEQ ID NO: 472 - protein, 5 aa, Artificial Sequence
  Synthetic
SYAMS

SEQ ID NO: 473 - protein, 17 aa, Artificial Sequence
  Synthetic
AISGSGGGTYYAASVKG

SEQ ID NO: 474 - protein, 10 aa, Artificial Sequence
  Synthetic
GKGVHLGFDY

SEQ ID NO: 475 - protein, 11 aa, Artificial Sequence
  Synthetic
GGNNIGSKSVH

SEQ ID NO: 476 - protein, 7 aa, Artificial Sequence
  Synthetic
DDNDRPS

SEQ ID NO: 477 - protein, 11 aa, Artificial Sequence
  Synthetic
QVWDYSGQRQV

SEQ ID NO: 478 - protein, 7 aa, Artificial Sequence
  Synthetic
SSSYFWG

SEQ ID NO: 479 - protein, 16 aa, Artificial Sequence
  Synthetic
NIYYSGSSNYNPSLKS

SEQ ID NO: 480 - protein, 11 aa, Artificial Sequence
  Synthetic
LPRGDRDAFDI

SEQ ID NO: 481 - protein, 11 aa, Artificial Sequence
  Synthetic
RASQGISNYLA

SEQ ID NO: 482 - protein, 7 aa, Artificial Sequence
  Synthetic
AASTLQS

SEQ ID NO: 483 - protein, 9 aa, Artificial Sequence
  Synthetic
QQSYSTPFT

SEQ ID NO: 484 - protein, 7 aa, Artificial Sequence
  Synthetic
SSSYFWG

SEQ ID NO: 485 - protein, 16 aa, Artificial Sequence
  Synthetic
NIYYSGSSNYNPSLKS

SEQ ID NO: 486 - protein, 11 aa, Artificial Sequence
  Synthetic
LPRGDRDAFDI

SEQ ID NO: 487 - protein, 11 aa, Artificial Sequence
  Synthetic
RASQGISNYLA

SEQ ID NO: 488 - protein, 7 aa, Artificial Sequence
  Synthetic
AASTLQS

SEQ ID NO: 489 - protein, 9 aa, Artificial Sequence
  Synthetic
QQSYSTPFT

SEQ ID NO: 490 - protein, 7 aa, Artificial Sequence
  Synthetic
SSSYFWG

SEQ ID NO: 491 - protein, 16 aa, Artificial Sequence
  Synthetic
NIYYSGSSNYNPSLKS

SEQ ID NO: 492 - protein, 11 aa, Artificial Sequence
  Synthetic
LPRGDRDAFDI

SEQ ID NO: 493 - protein, 11 aa, Artificial Sequence
  Synthetic
RASQGISNYLA

SEQ ID NO: 494 - protein, 7 aa, Artificial Sequence
  Synthetic
AASTLQS

SEQ ID NO: 495 - protein, 9 aa, Artificial Sequence
  Synthetic
QQSYSTPFT

SEQ ID NO: 496 - protein, 5 aa, Artificial Sequence
  Synthetic
DYYMT

SEQ ID NO: 497 - protein, 17 aa, Artificial Sequence
  Synthetic
YISSSGSTIYYADSVKG

SEQ ID NO: 498 - protein, 8 aa, Artificial Sequence
  Synthetic
DRNSHFDY

SEQ ID NO: 499 - protein, 11 aa, Artificial Sequence
  Synthetic
RASQGINTWLA

SEQ ID NO: 500 - protein, 7 aa, Artificial Sequence
  Synthetic
GASGLQS

SEQ ID NO: 501 - protein, 9 aa, Artificial Sequence
  Synthetic
QQAKSFPRT

SEQ ID NO: 502 - protein, 5 aa, Artificial Sequence
  Synthetic
DYYMT

SEQ ID NO: 503 - protein, 17 aa, Artificial Sequence
  Synthetic
YISSSGSTIYYADSVKG

SEQ ID NO: 504 - protein, 8 aa, Artificial Sequence
  Synthetic
DRNSHFDY

SEQ ID NO: 505 - protein, 11 aa, Artificial Sequence
  Synthetic
RASQGINTWLA

SEQ ID NO: 506 - protein, 7 aa, Artificial Sequence
  Synthetic
GASGLQS

SEQ ID NO: 507 - protein, 9 aa, Artificial Sequence
  Synthetic
QQAKSFPRT

SEQ ID NO: 508 - protein, 5 aa, Artificial Sequence
  Synthetic
GYYWS

SEQ ID NO: 509 - protein, 16 aa, Artificial Sequence
  Synthetic
DIDASGSTKYNPSLKS

SEQ ID NO: 510 - protein, 12 aa, Artificial Sequence
  Synthetic
KKYSTVWSYFDN

SEQ ID NO: 511 - protein, 11 aa, Artificial Sequence
  Synthetic
SGDKLGDKYAS

SEQ ID NO: 512 - protein, 7 aa, Artificial Sequence
  Synthetic
QDRKRPS

SEQ ID NO: 513 - protein, 9 aa, Artificial Sequence
  Synthetic
QAWGSSTAV

SEQ ID NO: 514 - protein, 5 aa, Artificial Sequence
  Synthetic
GYYWS

SEQ ID NO: 515 - protein, 16 aa, Artificial Sequence
  Synthetic
DIDASGSTKYNPSLKS

SEQ ID NO: 516 - protein, 12 aa, Artificial Sequence
  Synthetic
KKYSTVWSYFDN

SEQ ID NO: 517 - protein, 11 aa, Artificial Sequence
  Synthetic
SGDKLGDKYAS

SEQ ID NO: 518 - protein, 7 aa, Artificial Sequence
  Synthetic
QDRKRPS

SEQ ID NO: 519 - protein, 9 aa, Artificial Sequence
  Synthetic
QAWGSSTAV

SEQ ID NO: 520 - protein, 5 aa, Artificial Sequence
  Synthetic
DYYMY

SEQ ID NO: 521 - protein, 17 aa, Artificial Sequence
  Synthetic
IISDGGYYTYYSDIIKG

SEQ ID NO: 522 - protein, 12 aa, Artificial Sequence
  Synthetic
GFPLLRHGAMDY

SEQ ID NO: 523 - protein, 11 aa, Artificial Sequence
  Synthetic
KASQNVDTNVA

SEQ ID NO: 524 - protein, 7 aa, Artificial Sequence
  Synthetic
SASYRYS

SEQ ID NO: 525 - protein, 9 aa, Artificial Sequence
  Synthetic
QQYDSYPYT

SEQ ID NO: 526 - protein, 5 aa, Artificial Sequence
  Synthetic
DYYMY

SEQ ID NO: 527 - protein, 17 aa, Artificial Sequence
  Synthetic
IISDGGYYTYYSDIIKG

SEQ ID NO: 528 - protein, 12 aa, Artificial Sequence
  Synthetic
GFPLLRHGAMDY

SEQ ID NO: 529 - protein, 11 aa, Artificial Sequence
  Synthetic
KASQNVDTNVA

SEQ ID NO: 530 - protein, 7 aa, Artificial Sequence
  Synthetic
SASYVYW

SEQ ID NO: 531 - protein, 9 aa, Artificial Sequence
  Synthetic
QQYDQQLIT

SEQ ID NO: 532 - protein, 5 aa, Artificial Sequence
  Synthetic
DYYMY

SEQ ID NO: 533 - protein, 17 aa, Artificial Sequence
  Synthetic
IISDGGYYTYYSDIIKG

SEQ ID NO: 534 - protein, 12 aa, Artificial Sequence
  Synthetic
GFPLLRHGAMDY

SEQ ID NO: 535 - protein, 11 aa, Artificial Sequence
  Synthetic
KASQNVDTNVA

SEQ ID NO: 536 - protein, 7 aa, Artificial Sequence
  Synthetic
SASYVYW

SEQ ID NO: 537 - protein, 9 aa, Artificial Sequence
  Synthetic
QQYDQQLIT

SEQ ID NO: 538 - protein, 5 aa, Artificial Sequence
  Synthetic
DYYMY

SEQ ID NO: 539 - protein, 17 aa, Artificial Sequence
  Synthetic
IISDGGYYTYYSDIIKG

SEQ ID NO: 540 - protein, 12 aa, Artificial Sequence
  Synthetic
GFPLLRHGAMDY

SEQ ID NO: 541 - protein, 11 aa, Artificial Sequence
  Synthetic
KASQNVDTNVA

SEQ ID NO: 542 - protein, 7 aa, Artificial Sequence
  Synthetic
SASYVYW

SEQ ID NO: 543 - protein, 9 aa, Artificial Sequence
  Synthetic
QQYDQQLIT

SEQ ID NO: 544 - protein, 5 aa, Artificial Sequence
  Synthetic
DYYMY

SEQ ID NO: 545 - protein, 17 aa, Artificial Sequence
  Synthetic
IISDGGYYTYYSDIIKG

SEQ ID NO: 546 - protein, 12 aa, Artificial Sequence
  Synthetic
GFPLLRHGAMDY

SEQ ID NO: 547 - protein, 11 aa, Artificial Sequence
  Synthetic
KASQNVDTNVA

SEQ ID NO: 548 - protein, 7 aa, Artificial Sequence
  Synthetic
SASYRYS

SEQ ID NO: 549 - protein, 9 aa, Artificial Sequence
  Synthetic
QQYDSYPYT

SEQ ID NO: 550 - protein, 125 aa, Artificial Sequence
  Synthetic
EVQLVESGGGLVQPGGSLKLSCAASGFTFNKYAMNWVRQAPGKGMEWVARIRSKYNNYATYYADAVKDRFTISRDDSKNTLYLQMNNLKTEDTAVYYCVRAGNFGTSYISYWAYWGQGTLVTVSS

SEQ ID NO: 551 - protein, 109 aa, Artificial Sequence
  Synthetic
QTVVTQEPSLTVSPGGTVTITCGSSTGAVTSGNYPNWVQKKPGQAPRGLIGGTKFLAPGTPARFSGSLSGGKAALTLSGVQPEDEAEYYCVLWYSNRWVFGSGTKLTVL

SEQ ID NO: 552 - protein, 125 aa, Artificial Sequence
  Synthetic
EVQLVESGGGLVQPGGSLKLSCAASGFTFNKYAMNWVRQAPGKGMEWVARIRSKYNNYATYYADAVKDRFTISRDDSKNTLYLQMNNLKTEDTAVYYCVRAGNFGTSYISYWAYCGQGTLVTVSS

SEQ ID NO: 553 - protein, 109 aa, Artificial Sequence
  Synthetic
QTVVTQEPSLTVSPGGTVTITCGSSTGAVTSGNYPNWVQKKPGQCPRGLIGGTKFLAPGTPARFSGSLSGGKAALTLSGVQPEDEAEYYCVLWYSNRWVFGSGTKLTVL

SEQ ID NO: 554 - protein, 125 aa, Artificial Sequence; identical to SEQ ID NO: 550
  Synthetic

SEQ ID NO: 555 - protein, 109 aa, Artificial Sequence; identical to SEQ ID NO: 551
  Synthetic

SEQ ID NO: 556 - protein, 125 aa, Artificial Sequence; identical to SEQ ID NO: 552
  Synthetic

SEQ ID NO: 557 - protein, 109 aa, Artificial Sequence; identical to SEQ ID NO: 553
  Synthetic

SEQ ID NO: 558 - protein, 125 aa, Artificial Sequence
  Synthetic
EVQLVESGGGLVQPGGSLKLSCAASGFTFNKYAINWVRQAPGKGLEWVARIRSKYNNYATYYADAVKDRFTISRDDSKNTVYLQMNNLKTEDTAVYYCARAGNFGSSYISYWAYWGQGTLVTVSS

SEQ ID NO: 559 - protein, 109 aa, Artificial Sequence; identical to SEQ ID NO: 551
  Synthetic

SEQ ID NO: 560 - protein, 125 aa, Artificial Sequence
  Synthetic
EVQLVESGGGLVQPGGSLKLSCAASGFTFNKYAINWVRQAPGKGLEWVARIRSKYNNYATYYADAVKDRFTISRDDSKNTVYLQMNNLKTEDTAVYYCARAGNFGSSYISYWAYCGQGTLVTVSS

SEQ ID NO: 561 - protein, 109 aa, Artificial Sequence; identical to SEQ ID NO: 553
  Synthetic

SEQ ID NO: 562 - protein, 125 aa, Artificial Sequence; identical to SEQ ID NO: 558
  Synthetic

SEQ ID NO: 563 - protein, 109 aa, Artificial Sequence; identical to SEQ ID NO: 551
  Synthetic

SEQ ID NO: 564 - protein, 125 aa, Artificial Sequence; identical to SEQ ID NO: 560
  Synthetic

SEQ ID NO: 565 - protein, 109 aa, Artificial Sequence; identical to SEQ ID NO: 553
  Synthetic

SEQ ID NO: 566 - protein, 125 aa, Artificial Sequence
  Synthetic
EVQLVESGGGLVQPGGSLKLSCAASGFTFNKYAMNWVRQAPGKGLEWVARIRSKYNNYATYYAEAVKGRFTISRDDSKNTVYLQMNNLKTEDTAVYYCVRNENIGTSYISYWAYWGQGTLVTVSS

SEQ ID NO: 567 - protein, 109 aa, Artificial Sequence
  Synthetic
QTVVTQEPSLTVSPGGTVTITCGSSTGAVTSGNYPNWVQQKPGQAPRGLIGGTKFLAPGTPARFSGSLSGGKAALTLSGVQPEDEAEYYCVLWYSNRWVFGSGTKLTVL

SEQ ID NO: 568 - protein, 125 aa, Artificial Sequence
  Synthetic
EVQLVESGGGLVQPGGSLKLSCAASGFTFNKYAMNWVRQAPGKGLEWVARIRSKYNNYATYYAEAVKGRFTISRDDSKNTVYLQMNNLKTEDTAVYYCVRNENIGTSYISYWAYCGQGTLVTVSS

SEQ ID NO: 569 - protein, 109 aa, Artificial Sequence
  Synthetic
QTVVTQEPSLTVSPGGTVTITCGSSTGAVTSGNYPNWVQQKPGQCPRGLIGGTKFLAPGTPARFSGSLSGGKAALTLSGVQPEDEAEYYCVLWYSNRWVFGSGTKLTVL

SEQ ID NO: 570 - protein, 125 aa, Artificial Sequence; identical to SEQ ID NO: 566
  Synthetic

SEQ ID NO: 571 - protein, 109 aa, Artificial Sequence; identical to SEQ ID NO: 567
  Synthetic

SEQ ID NO: 572 - protein, 125 aa, Artificial Sequence; identical to SEQ ID NO: 568
  Synthetic

SEQ ID NO: 573 - protein, 109 aa, Artificial Sequence; identical to SEQ ID NO: 569
  Synthetic

SEQ ID NO: 574 - protein, 125 aa, Artificial Sequence
  Synthetic
EVQLVESGGGLVQPGGSLKLSCAASGFTFNKYAINWVREAPGKGLEWVARIRSKYNNYATYYADAVKDRFTISRDDSKNTAYLQMNNLKTEDTAVYYCVRNANFGTSYISYFAYWGQGTLVTVSS

SEQ ID NO: 575 - protein, 109 aa, Artificial Sequence
  Synthetic
QTVVTQEPSLTVSPGGTVTLTCGSSTGAVTSGNYPNWVQKKPGQAPRGLIGGTKFLAPGTPARFSGSLLGGKAALTLSGVQPEDEAEYYCVLWYSNRWVFGSGTKLTVL

SEQ ID NO: 576 - protein, 125 aa, Artificial Sequence
  Synthetic
EVQLVESGGGLVQPGGSLKLSCAASGFTFNKYAINWVREAPGKGLEWVARIRSKYNNYATYYADAVKDRFTISRDDSKNTAYLQMNNLKTEDTAVYYCVRNANFGTSYISYFAYCGQGTLVTVSS

SEQ ID NO: 577 - protein, 109 aa, Artificial Sequence
  Synthetic
QTVVTQEPSLTVSPGGTVTLTCGSSTGAVTSGNYPNWVQKKPGQCPRGLIGGTKFLAPGTPARFSGSLLGGKAALTLSGVQPEDEAEYYCVLWYSNRWVFGSGTKLTVL

SEQ ID NO: 578 - protein, 125 aa, Artificial Sequence; identical to SEQ ID NO: 574
  Synthetic

SEQ ID NO: 579 - protein, 109 aa, Artificial Sequence; identical to SEQ ID NO: 575
  Synthetic

SEQ ID NO: 580 - protein, 125 aa, Artificial Sequence; identical to SEQ ID NO: 576
  Synthetic

SEQ ID NO: 581 - protein, 109 aa, Artificial Sequence; identical to SEQ ID NO: 577
  Synthetic

SEQ ID NO: 582 - protein, 125 aa, Artificial Sequence
  Synthetic
EVQLVESGGGLVQPGGSLKLSCAASGFTFNKYAMNWVRQAPGKGMEWVARIRSKYNNYATYYADAVKDRFTISRDDSKNTLYLQMNNLKTEDTAVYYCVRAGNFGSSYISYFAYWGQGTLVTVSS

SEQ ID NO: 583 - protein, 109 aa, Artificial Sequence
  Synthetic
QTVVTQEPSLTVSPGGTVTITCGSSTGAVTSGNYPNWIQKKPGQAPRGLIGGTKFLAPGTPARFSGSLEGGKAALTLSGVQPEDEAEYYCVLYYSNRWVFGSGTKLTVL

SEQ ID NO: 584 - protein, 125 aa, Artificial Sequence
  Synthetic
EVQLVESGGGLVQPGGSLKLSCAASGFTFNKYAMNWVRQAPGKGMEWVARIRSKYNNYATYYADAVKDRFTISRDDSKNTLYLQMNNLKTEDTAVYYCVRAGNFGSSYISYFAYCGQGTLVTVSS

SEQ ID NO: 585 - protein, 109 aa, Artificial Sequence
  Synthetic
QTVVTQEPSLTVSPGGTVTITCGSSTGAVTSGNYPNWIQKKPGQCPRGLIGGTKFLAPGTPARFSGSLEGGKAALTLSGVQPEDEAEYYCVLYYSNRWVFGSGTKLTVL

SEQ ID NO: 586 - protein, 125 aa, Artificial Sequence; identical to SEQ ID NO: 582
  Synthetic

SEQ ID NO: 587 - protein, 109 aa, Artificial Sequence; identical to SEQ ID NO: 583
  Synthetic

SEQ ID NO: 588 - protein, 125 aa, Artificial Sequence; identical to SEQ ID NO: 584
  Synthetic

SEQ ID NO: 589 - protein, 109 aa, Artificial Sequence; identical to SEQ ID NO: 585
  Synthetic

SEQ ID NO: 590 - protein, 125 aa, Artificial Sequence
  Synthetic
EVQLVESGGGLVQPGGSLKLSCAASGFTFNKYAMNWVRQAPGKGLEWVARIRSKYNNYATYYADSVKDRFTISRDDSKNTAYLQMNNLKTEDTAVYYCVRHGNFGNSYISYWAYWGQGTLVTVSS

SEQ ID NO: 591 - protein, 109 aa, Artificial Sequence
  Synthetic
QTVVTQEPSLTVSPGGTVTLTCGSSTGAVTSGNYPNWVQQKPGQAPRGLIGGTKFLAPGTPARFSGSLLGGKAALTLSGVQPEDEAEYYCVLWYSNRWVFGGGTKLTVL

SEQ ID NO: 592 - protein, 125 aa, Artificial Sequence
  Synthetic
EVQLVESGGGLVQPGGSLKLSCAASGFTFNKYAMNWVRQAPGKGLEWVARIRSKYNNYATYYADSVKDRFTISRDDSKNTAYLQMNNLKTEDTAVYYCVRHGNFGNSYISYWAYCGQGTLVTVSS

SEQ ID NO: 593 - protein, 109 aa, Artificial Sequence
  Synthetic
QTVVTQEPSLTVSPGGTVTLTCGSSTGAVTSGNYPNWVQQKPGQCPRGLIGGTKFLAPGTPARFSGSLLGGKAALTLSGVQPEDEAEYYCVLWYSNRWVFGGGTKLTVL

SEQ ID NO: 594 - protein, 125 aa, Artificial Sequence; identical to SEQ ID NO: 590
  Synthetic

SEQ ID NO: 595 - protein, 109 aa, Artificial Sequence; identical to SEQ ID NO: 591
  Synthetic

SEQ ID NO: 596 - protein, 125 aa, Artificial Sequence; identical to SEQ ID NO: 592
  Synthetic

SEQ ID NO: 597 - protein, 109 aa, Artificial Sequence; identical to SEQ ID NO: 593
  Synthetic

SEQ ID NO: 598 - protein, 121 aa, Artificial Sequence
  Synthetic
QVQLVQSGAEVKKPGASVKVSCKASGYTFTNHIIHWVRQAPGQGLEWMGYINPYPGYHAYNEKFQGRATMTSDTSTSTVYMELSSLRSEDTAVYYCARDGYYRDTDVLDYWGQGTLVTVSS

SEQ ID NO: 599 - protein, 107 aa, Artificial Sequence
  Synthetic
DIQMTQSPSSLSASVGDRVTITCQASQDISNYLNWYQQKPGKAPKLLIYYTSRLHTGVPSRFSGSGSGTDFTFTISSLEPEDIATYYCQQGNTLPWTFGQGTKVEIK

SEQ ID NO: 600 - protein, 121 aa, Artificial Sequence
  Synthetic
QVQLVQSGAEVKKPGASVKVSCKASGYTFTNHIIHWVRQAPGQCLEWMGYINPYPGYHAYNEKFQGRATMTSDTSTSTVYMELSSLRSEDTAVYYCARDGYYRDTDVLDYWGQGTLVTVSS

SEQ ID NO: 601 - protein, 107 aa, Artificial Sequence
  Synthetic
DIQMTQSPSSLSASVGDRVTITCQASQDISNYLNWYQQKPGKAPKLLIYYTSRLHTGVPSRFSGSGSGTDFTFTISSLEPEDIATYYCQQGNTLPWTFGCGTKVEIK

SEQ ID NO: 602 - protein, 121 aa, Artificial Sequence; identical to SEQ ID NO: 600
  Synthetic

SEQ ID NO: 603 - protein, 107 aa, Artificial Sequence
  Synthetic
EIQMTQSPSSLSASVGDRVTITCQASQDISNYLNWYQQKPGKAPKLLIYYTSRLHTGVPSRFSGSGSGTDFTFTISSLEPEDIATYYCQQGNTLPWTFGCGTKVEIK

SEQ ID NO: 604 - protein, 121 aa, Artificial Sequence; identical to SEQ ID NO: 598
  Synthetic

SEQ ID NO: 605 - protein, 107 aa, Artificial Sequence
  Synthetic
EIQMTQSPSSLSASVGDRVTITCQASQDISNYLNWYQQKPGKAPKLLIYYTSRLHTGVPSRFSGSGSGTDFTFTISSLEPEDIATYYCQQGNTLPWTFGQGTKVEIK

SEQ ID NO: 606 - protein, 119 aa, Artificial Sequence
  Synthetic
EVQLLESGGGLVQPGGSLRLSCAASGFTFSHYAMSWVRQAPGKCLEWVSAVSGGGDKTLYADAVKGRFTISRDNSKNTLFLQMNSLRAEDTAIYYCARLRGFYYGMDVWGQGTTVTVSS

SEQ ID NO: 607 - protein, 113 aa, Artificial Sequence
  Synthetic
DIVLTQSPLSLPVTPGEPASISCRSSQSLLHSNKYNYLDWYLQKPGQSPQLLIYLGSNRASGVPDRFSGSGSGTDFTLKISRVEAEDVGVYYCMQALQTPPITFGCGTRLEIK

SEQ ID NO: 608 - protein, 119 aa, Artificial Sequence; identical to SEQ ID NO: 606
  Synthetic

SEQ ID NO: 609 - protein, 113 aa, Artificial Sequence
  Synthetic
EIVLTQSPLSLPVTPGEPASISCRSSQSLLHSNKYNYLDWYLQKPGQSPQLLIYLGSNRASGVPDRFSGSGSGTDFTLKISRVEAEDVGVYYCMQALQTPPITFGCGTRLEIK

SEQ ID NO: 610 - protein, 122 aa, Artificial Sequence
  Synthetic
QVQLVESGGGVVQPGRSLRLSCAASGFTFSSYGMHWVRQAPGKCLEWVAVISYEGSNKYYAESVKGRFTISRDNSKNTLYLQMNSLRDEDTAVYYCARDRGTIFGNYGLEVWGQGTTVTVSS

SEQ ID NO: 611 - protein, 112 aa, Artificial Sequence
  Synthetic
DIVMTQSPLSLPVISGEPASISCRSSQSLLHKNAFNYLDWYLQKPGQSPQLLIYLGSNRASGVPDRFSGSGSGTDFTLKISRVEAEDVGVYYCMQALQTPFTFGCGTKVDIK

SEQ ID NO: 612 - protein, 122 aa, Artificial Sequence; identical to SEQ ID NO: 610
  Synthetic

SEQ ID NO: 613 - protein, 112 aa, Artificial Sequence; identical to SEQ ID NO: 611
  Synthetic

SEQ ID NO: 614 - protein, 122 aa, Artificial Sequence
  Synthetic
QVQLVQSGAEVKKPGESVKVSCKASGYTFTNYGMNWVKQAPGQGLEWMGWINTYTGEPTYADKFQGRVTMTTDTSTSTAYMEIRNLGGDDTAVYYCARWSWSDGYYVYFDYWGQGTSVTVSS

SEQ ID NO: 615 - protein, 113 aa, Artificial Sequence
  Synthetic
DIVMTQSPDSLTVSLGERTTINCKSSQSVLDSSTNKNSLAWYQQKPGQPPKLLLSWASTRESGIPDRFSGSGSGTDFTLTIDSPQPEDSATYYCQQSAHFPITFGQGTRLEIK

SEQ ID NO: 616 - protein, 122 aa, Artificial Sequence
  Synthetic
QVQLVQSGAEVKKPGESVKVSCKASGYTFTNYGMNWVKQAPGQCLEWMGWINTYTGEPTYADKFQGRVTMTTDTSTSTAYMEIRNLGGDDTAVYYCARWSWSDGYYVYFDYWGQGTSVTVSS

SEQ ID NO: 617 - protein, 113 aa, Artificial Sequence
  Synthetic
DIVMTQSPDSLTVSLGERTTINCKSSQSVLDSSTNKNSLAWYQQKPGQPPKLLLSWASTRESGIPDRFSGSGSGTDFTLTIDSPQPEDSATYYCQQSAHFPITFGCGTRLEIK

SEQ ID NO: 618 - protein, 122 aa, Artificial Sequence; identical to SEQ ID NO: 616
  Synthetic

SEQ ID NO: 619 - protein, 113 aa, Artificial Sequence; identical to SEQ ID NO: 617
  Synthetic

SEQ ID NO: 620 - protein, 122 aa, Artificial Sequence; identical to SEQ ID NO: 616
  Synthetic

SEQ ID NO: 621 - protein, 113 aa, Artificial Sequence; identical to SEQ ID NO: 617
  Synthetic

SEQ ID NO: 622 - protein, 122 aa, Artificial Sequence; identical to SEQ ID NO: 616
  Synthetic

SEQ ID NO: 623 - protein, 113 aa, Artificial Sequence
  Synthetic
EIVMTQSPDSLTVSLGERTTINCKSSQSVLDSSTNKNSLAWYQQKPGQPPKLLLSWASTRESGIPDRFSGSGSGTDFTLTIDSPQPEDSATYYCQQSAHFPITFGCGTRLEIK

SEQ ID NO: 624 - protein, 122 aa, Artificial Sequence; identical to SEQ ID NO: 614
  Synthetic

SEQ ID NO: 625 - protein, 113 aa, Artificial Sequence
  Synthetic
EIVMTQSPDSLTVSLGERTTINCKSSQSVLDSSTNKNSLAWYQQKPGQPPKLLLSWASTRESGIPDRFSGSGSGTDFTLTIDSPQPEDSATYYCQQSAHFPITFGQGTRLEIK

SEQ ID NO: 626 - protein, 120 aa, Artificial Sequence
  Synthetic
EVQLLESGGGMVQPGGSLRLSCAASGFTFSTYAMSWVRQAPGKCLEWVSAISGSGGRTFYAESVEGRFTISRDNSKNTLYLQMNSLRAEDTAVYYCAKHDYSNYPYFDYWGQGTLVTVSS

SEQ ID NO: 627 - protein, 108 aa, Artificial Sequence
  Synthetic
EIVLTQSPGTLSLSPGERATLSCRASQSVRSTYLAWYQQKPGQAPRLLIYGASSRATGIPDRFSGSGSGTDFTLTISRLEPEDFAVYSCQQYGDLPFTFGCGTKLEIK

SEQ ID NO: 628 - protein, 120 aa, Artificial Sequence; identical to SEQ ID NO: 626
  Synthetic

SEQ ID NO: 629 - protein, 108 aa, Artificial Sequence; identical to SEQ ID NO: 627
  Synthetic

SEQ ID NO: 630 - protein, 125 aa, Artificial Sequence
  Synthetic
QVQLVESGGGVVQPGGSLRLSCAASGFTFSSYGMHWVRQAPGKCLEWVAFIWYEGSNKYYAESVKDRFTISRDNSKNTLYLQMNSLRAEDTAVYYCARRAGIIGTIGYYYGMDVWGQGTTVTVSS

SEQ ID NO: 631 - protein, 106 aa, Artificial Sequence
  Synthetic
SYELTQPPSVSVSPGQTASITCSGDRLGEKYTSWYQQRPGQSPLLVIYQDTKRPSGIPERFSGSNSGNTATLTISGTQAMDEADYYCQAWESSTVVFGCGTKLTVL

SEQ ID NO: 632 - protein, 125 aa, Artificial Sequence; identical to SEQ ID NO: 630
  Synthetic

SEQ ID NO: 633 - protein, 106 aa, Artificial Sequence; identical to SEQ ID NO: 631
  Synthetic

SEQ ID NO: 634 - protein, 117 aa, Artificial Sequence
  Synthetic
QVQLVQSGAEVKKPGASVKVSCKASGYTFTNYWMNWVRQAPGQCLEWMGNIAYGVKGTNYNQKFQGRVTMTVDTSSSTAYMELSRLRSDDTAVYYCATRYFYVMDYWGQGTLVTVSS

SEQ ID NO: 635 - protein, 107 aa, Artificial Sequence
  Synthetic
DIQMTQSPSSLSASVGDRVTITCRASQDISNYLNWYQQKPGKVPKLLIYYTSRLHSGVPSRFSGSGSGTDFTLTISSLQPEDVATYYCVQYAQFPLTFGCGTKVEIK

SEQ ID NO: 636 - protein, 117 aa, Artificial Sequence; identical to SEQ ID NO: 634
  Synthetic

SEQ ID NO: 637 - protein, 107 aa, Artificial Sequence; identical to SEQ ID NO: 635
  Synthetic

SEQ ID NO: 638 - protein, 117 aa, Artificial Sequence; identical to SEQ ID NO: 634
  Synthetic

SEQ ID NO: 639 - protein, 107 aa, Artificial Sequence
  Synthetic
EIQMTQSPSSLSASVGDRVTITCRASQDISNYLNWYQQKPGKVPKLLIYYTSRLHSGVPSRFSGSGSGTDFTLTISSLQPEDVATYYCVQYAQFPLTFGCGTKVEIK

SEQ ID NO: 640 - protein, 123 aa, Artificial Sequence
  Synthetic
EVQLLESGGGLVQPGGSLRLSCAASGFSFSSYPINWVRQAPGKGLEWVGVIWTGGGTNYASSVKGRFTISRDNSKNTVYLQMNSLRAEDTAVYYCAKSRGVYDFDGRGAMDYWGQGTLVTVSS

SEQ ID NO: 641 - protein, 113 aa, Artificial Sequence
  Synthetic
DIVMTQSPDSLAVSLGERATINCKSSQSLLYSSNQKNYFAWYQQKPGQPPKLLIYWASTRESGVPDRFSGSGSGTDFTLTISSLQAEDVAVYYCQQYYSYPYTFGQGTKLEIK

SEQ ID NO: 642 - protein, 123 aa, Artificial Sequence; identical to SEQ ID NO: 640
  Synthetic

SEQ ID NO: 643 - protein, 113 aa, Artificial Sequence
  Synthetic
EIVMTQSPDSLAVSLGERATINCKSSQSLLYSSNQKNYFAWYQQKPGQPPKLLIYWASTRESGVPDRFSGSGSGTDFTLTISSLQAEDVAVYYCQQYYSYPYTFGQGTKLEIK

SEQ ID NO: 644 - protein, 125 aa, Artificial Sequence
  Synthetic
QVQLVQSGAEVKKPGASVKVSCKASGYTFTGYYMHWVRQAPGQCLEWMGWINPNSGGTKYAQKFQGRVTMTRDTSISTAYMELSRLRSDDTAVYYCARDRITVAGTYYYYGMDVWGQGTTVTVSS

SEQ ID NO: 645 - protein, 107 aa, Artificial Sequence
  Synthetic
DIQMTQSPSSVSASVGDRVTITCRASQGVNNWLAWYQQKPGKAPKLLIYTASSLQSGVPSRFSGSGSGTDFTLTIRSLQPEDFATYYCQQANSFPITFGCGTRLEIK

SEQ ID NO: 646 - protein, 125 aa, Artificial Sequence; identical to SEQ ID NO: 644
  Synthetic

SEQ ID NO: 647 - protein, 107 aa, Artificial Sequence
  Synthetic
EIQMTQSPSSVSASVGDRVTITCRASQGVNNWLAWYQQKPGKAPKLLIYTASSLQSGVPSRFSGSGSGTDFTLTIRSLQPEDFATYYCQQANSFPITFGCGTRLEIK

SEQ ID NO: 648 - protein, 122 aa, Artificial Sequence
  Synthetic
QVQLVQSGAEVKKPGASVKVSCKASGYTFTNYYMHWVRQAPGQCLEWMGWINPTSGGANYAQKFQGRVTMTRDTSISTAYMELSRLRSDDTAVYFCARESHAIQEGIWFDYWGQGTLVTVSS

SEQ ID NO: 649 - protein, 107 aa, Artificial Sequence
  Synthetic
DIQMTQSPSSLSASVGDRVTISCRASQSISNYLNWYQQKPGKAPKLLIYDASSLQSGVPSRFSGSGSGTDFTLTISSLQPEDFATYYCQQSYSFPLTFGCGTKVEIK

SEQ ID NO: 650 - protein, 122 aa, Artificial Sequence; identical to SEQ ID NO: 648
  Synthetic

SEQ ID NO: 651 - protein, 107 aa, Artificial Sequence
  Synthetic
EIQMTQSPSSLSASVGDRVTISCRASQSISNYLNWYQQKPGKAPKLLIYDASSLQSGVPSRFSGSGSGTDFTLTISSLQPEDFATYYCQQSYSFPLTFGCGTKVEIK

SEQ ID NO: 652 - protein, 129 aa, Artificial Sequence
  Synthetic
QVQLVQSGAEVKKPGASVKVSCKASGYTFTGYYMHWVRQAPGQCLEWMGWINPNSGETNYAQKFQGRVTMTRDTSISTAYMELSRLRSDDTAVYYCARDALIVVAPVTRDYYYYGMDVWGQGTTVTVSS

SEQ ID NO: 653 - protein, 108 aa, Artificial Sequence
  Synthetic
EIVLTQSPGTLSLSPGERATLSCRASQSVSSSYLAWYQQKPGQAPRLLIYGASSRATGIPDRFSGSGSGTDFTLTISRLEPEDFAVYYCQQYGSSPLTFGCGTKLEIK

SEQ ID NO: 654 - protein, 129 aa, Artificial Sequence; identical to SEQ ID NO: 652
  Synthetic

SEQ ID NO: 655 - protein, 108 aa, Artificial Sequence; identical to SEQ ID NO: 653
  Synthetic

SEQ ID NO: 656 - protein, 120 aa, Artificial Sequence
  Synthetic
QVQLVQSGAEVKKPGASVKVSCKASGYAFSSSWMNWVRQAPGQCLEWIGRIYPGDADAKYNAKFKGKATLTADKSTSTAYMELSSLRSEDTAVYYCARSTMIATGAMDYWGQGTLVTVSS

SEQ ID NO: 657 - protein, 109 aa, Artificial Sequence
  Synthetic
DIQMTQSPSSLSASVGDRVTITCKASQDVSTAVAWYQQKPGKAPKLLIYSASYRYTGVPDRFTGSGSGTDFTLTISSLQPEDFATYYCQQHYSTPPYTFGCGTKVEIKR

SEQ ID NO: 658 - protein, 120 aa, Artificial Sequence; identical to SEQ ID NO: 656
  Synthetic

SEQ ID NO: 659 - protein, 108 aa, Artificial Sequence
  Synthetic
DIQMTQSPSSLSASVGDRVTITCKASQDVSTAVAWYQQKPGKAPKLLIYSASYRYTGVPDRFTGSGSGTDFTLTISSLQPEDFATYYCQQHYSTPPYTFGCGTKVEIK

SEQ ID NO: 660 - protein, 120 aa, Artificial Sequence; identical to SEQ ID NO: 656
  Synthetic

SEQ ID NO: 661 - protein, 108 aa, Artificial Sequence; identical to SEQ ID NO: 659
  Synthetic

SEQ ID NO: 662 - protein, 118 aa, Artificial Sequence
  Synthetic
QVQLQESGPGLVKPSETLSLTCTVSGGSISSYYWSWIRQPPGKCLEWIGYVYYSGTTNYNPSLKSRVTISVDTSKNQFSLKLSSVTAADTAVYYCASIAVTGFYFDYWGQGTLVTVSS

SEQ ID NO: 663 - protein, 108 aa, Artificial Sequence
  Synthetic
EIVLTQSPGTLSLSPGERVTLSCRASQRVNNNYLAWYQQRPGQAPRLLIYGASSRATGIPDRFSGSGSGTDFTLTISRLEPEDFAVYYCQQYDRSPLTFGCGTKLEIK

SEQ ID NO: 664 - protein, 118 aa, Artificial Sequence; identical to SEQ ID NO: 662
  Synthetic

SEQ ID NO: 665 - protein, 108 aa, Artificial Sequence; identical to SEQ ID NO: 663
  Synthetic

SEQ ID NO: 666 - protein, 124 aa, Artificial Sequence
  Synthetic
QVQLVESGGGVVQSGRSLRLSCAASGFTFRNYGMHWVRQAPGKCLEWVAVIWYDGSDKYYADSVRGRFTISRDNSKNTLYLQMNSLRAEDTAVYYCARDGYDILTGNPRDFDYWGQGTLVTVSS

SEQ ID NO: 667 - protein, 112 aa, Artificial Sequence
  Synthetic
DTVMTQTPLSSHVTLGQPASISCRSSQSLVHSDGNTYLSWLQQRPGQPPRLLIYRISRRFSGVPDRFSGSGAGTDFTLEISRVEAEDVGVYYCMQSTHVPRTFGCGTKVEIK

SEQ ID NO: 668 - protein, 124 aa, Artificial Sequence; identical to SEQ ID NO: 666
  Synthetic

SEQ ID NO: 669 - protein, 112 aa, Artificial Sequence; identical to SEQ ID NO: 667
  Synthetic

SEQ ID NO: 670 - protein, 124 aa, Artificial Sequence
  Synthetic
QVTLKESGPTLVKPTETLTLTCTLSGFSLNNARMGVSWIRQPPGKCLEWLAHIFSNDEKSYSTSLKNRLTISKDSSKTQVVLTMTNVDPVDTATYYCARIVGYGSGWYGFFDYWGQGTLVTVSS

SEQ ID NO: 671 - protein, 107 aa, Artificial Sequence
  Synthetic
DIQMTQSPSSLSASVGDRVTITCRASQGIRNDLGWYQQKPGKAPKRLIYAASTLQSGVPSRFSGSGSGTEFTLTISSLQPEDFATYYCLQHNSYPLTFGCGTKVEIK

SEQ ID NO: 672 - protein, 124 aa, Artificial Sequence; identical to SEQ ID NO: 670
  Synthetic

SEQ ID NO: 673 - protein, 107 aa, Artificial Sequence
  Synthetic
EIQMTQSPSSLSASVGDRVTITCRASQGIRNDLGWYQQKPGKAPKRLIYAASTLQSGVPSRFSGSGSGTEFTLTISSLQPEDFATYYCLQHNSYPLTFGCGTKVEIK

SEQ ID NO: 674 - protein, 127 aa, Artificial Sequence
  Synthetic
EVQLVESGGGLVQPGGSLRLSCAASGFTFSNAWMSWVRQAPGKCLEWVGRIRSRSYGGTTDYAAPVKGRFTISRDDSKNTLFLQMNSLKTEDTAVYYCTTPSYSGSYYNYFSVMDVWGQGTTVTVSS

SEQ ID NO: 675 - protein, 107 aa, Artificial Sequence
  Synthetic
DIQMTQSPSSLSASVGDRVTITCRTSQSISSYLNWYQQKPGRAPKLLIFAASSLQGGVPSRFSGSGSGTDFTLTISSLQPEDFATYYCQQTYSMPFTFGCGTKVEIK

SEQ ID NO: 676 - protein, 127 aa, Artificial Sequence; identical to SEQ ID NO: 674
  Synthetic

SEQ ID NO: 677 - protein, 107 aa, Artificial Sequence
  Synthetic
EIQMTQSPSSLSASVGDRVTITCRTSQSISSYLNWYQQKPGRAPKLLIFAASSLQGGVPSRFSGSGSGTDFTLTISSLQPEDFATYYCQQTYSMPFTFGCGTKVEIK

SEQ ID NO: 678 - protein, 119 aa, Artificial Sequence
  Synthetic
EVQLLESGGGLVQPGGSLRLSCAASGFTFSSYAMSWVRQAPGKCLEWVSAISGSGGGTYYAASVKGRFTISRDNSKNTLYLQMSSLRAEDTAVYYCATGKGVHLGFDYWGQGTLVTVSS

SEQ ID NO: 679 - protein, 108 aa, Artificial Sequence
  Synthetic
SYVLTQPPSVSVAPGQTARITCGGNNIGSKSVHWYQQKPGQAPVMVVYDDNDRPSGIPERFSGSNSGNTATLTISRVEAGDEADYYCQVWDYSGQRQVFGCGTKLTVL

SEQ ID NO: 680 - protein, 119 aa, Artificial Sequence; identical to SEQ ID NO: 678
  Synthetic

SEQ ID NO: 681 - protein, 108 aa, Artificial Sequence; identical to SEQ ID NO: 679
  Synthetic

SEQ ID NO: 682 - protein, 121 aa, Artificial Sequence
  Synthetic
QVQLQESGPGLVKPSETLSLTCTVSGGSISSSSYFWGWIRQPPGKCLEWIGNIYYSGSSNYNPSLKSRVTISVDTSKNQFSLKLSSVTAADTAVYYCARLPRGDRDAFDIWGQGTMVTVSS

SEQ ID NO: 683 - protein, 107 aa, Artificial Sequence
  Synthetic
DIVMTQSPSSLSASVGDRVTITCRASQGISNYLAWYQQKPGKVPKLLIYAASTLQSGVPSRFSGSGSGTDFTLTISSLQPEDFATYYCQQSYSTPFTFGCGTKVEIK

SEQ ID NO: 684 - protein, 121 aa, Artificial Sequence; identical to SEQ ID NO: 682
  Synthetic

SEQ ID NO: 685 - protein, 107 aa, Artificial Sequence; identical to SEQ ID NO: 683
  Synthetic

SEQ ID NO: 686 - protein, 121 aa, Artificial Sequence; identical to SEQ ID NO: 682
  Synthetic

SEQ ID NO: 687 - protein, 107 aa, Artificial Sequence
  Synthetic
EIVMTQSPSSLSASVGDRVTITCRASQGISNYLAWYQQKPGKVPKLLIYAASTLQSGVPSRFSGSGSGTDFTLTISSLQPEDFATYYCQQSYSTPFTFGCGTKVEIK

SEQ ID NO: 688 - protein, 117 aa, Artificial Sequence
  Synthetic
QVQLVESGGGLVKPGGSLRLSCAASGFTFSDYYMTWIRQAPGKGLEWLSYISSSGSTIYYADSVKGRFTISRDNAKNSLFLQMNSLRAEDTAVYYCARDRNSHFDYWGQGTLVTVSS

SEQ ID NO: 689 - protein, 107 aa, Artificial Sequence
  Synthetic
DIQMTQSPSSVSASVGDRVTITCRASQGINTWLAWYQQKPGKAPKLLIYGASGLQSGVPSRFSGSGSGTDFTLTISSLQPEDFATYYCQQAKSFPRTFGQGTKVEIK

SEQ ID NO: 690 - protein, 117 aa, Artificial Sequence; identical to SEQ ID NO: 688
  Synthetic

SEQ ID NO: 691 - protein, 107 aa, Artificial Sequence
  Synthetic
EIQMTQSPSSVSASVGDRVTITCRASQGINTWLAWYQQKPGKAPKLLIYGASGLQSGVPSRFSGSGSGTDFTLTISSLQPEDFATYYCQQAKSFPRTFGQGTKVEIK

SEQ ID NO: 692 - protein, 120 aa, Artificial Sequence
  Synthetic
QVQLQQWGAGLLKPSETLSLTCAVYGGSFSGYYWSWIRQPPGKCLEWIGDIDASGSTKYNPSLKSRVTISLDTSKNQFSLKLNSVTAADTAVYFCARKKYSTVWSYFDNWGQGTLVTVSS

SEQ ID NO: 693 - protein, 106 aa, Artificial Sequence
  Synthetic
SYELTQPSSVSVPPGQTASITCSGDKLGDKYASWYQQKPGQSPVLVIYQDRKRPSGVPERFSGSNSGNTATLTISGTQAMDEADYYCQAWGSSTAVFGCGTKLTVL

SEQ ID NO: 694 - protein, 120 aa, Artificial Sequence; identical to SEQ ID NO: 692
  Synthetic

SEQ ID NO: 695 - protein, 106 aa, Artificial Sequence; identical to SEQ ID NO: 693
  Synthetic

SEQ ID NO: 696 - protein, 121 aa, Artificial Sequence
  Synthetic
QVQLVESGGGLVKPGESLRLSCAASGFTFSDYYMYWVRQAPGKGLEWVAIISDGGYYTYYSDIIKGRFTISRDNAKNSLYLQMNSLKAEDTAVYYCARGFPLLRHGAMDYWGQGTLVTVSS

SEQ ID NO: 697 - protein, 107 aa, Artificial Sequence
  Synthetic
DIQMTQSPSSLSASVGDRVTITCKASQNVDTNVAWYQQKPGQAPKSLIYSASYRYSDVPSRFSGSASGTDFTLTISSVQSEDFATYYCQQYDSYPYTFGGGTKLEIK

SEQ ID NO: 698 - protein, 121 aa, Artificial Sequence
  Synthetic
QVQLVESGGGLVKPGESLRLSCAASGFTFSDYYMYWVRQAPGKCLEWVAIISDGGYYTYYSDIIKGRFTISRDNAKNSLYLQMNSLKAEDTAVYYCARGFPLLRHGAMDYWGQGTLVTVSS

SEQ ID NO: 699 - protein, 107 aa, Artificial Sequence
  Synthetic
DIQMTQSPSSLSASVGDRVTITCKASQNVDTNVAWYQQKPGQAPKSLIYSASYVYWDVPSRFSGSASGTDFTLTISSVQSEDFATYYCQQYDQQLITFGCGTKLEIK

SEQ ID NO: 700 - protein, 121 aa, Artificial Sequence; identical to SEQ ID NO: 698
  Synthetic

SEQ ID NO: 701 - protein, 107 aa, Artificial Sequence; identical to SEQ ID NO: 699
  Synthetic

SEQ ID NO: 702 - protein, 121 aa, Artificial Sequence; identical to SEQ ID NO: 698
  Synthetic

SEQ ID NO: 703 - protein, 107 aa, Artificial Sequence
  Synthetic
EIQMTQSPSSLSASVGDRVTITCKASQNVDTNVAWYQQKPGQAPKSLIYSASYVYWDVPSRFSGSASGTDFTLTISSVQSEDFATYYCQQYDQQLITFGCGTKLEIK

SEQ ID NO: 704 - protein, 121 aa, Artificial Sequence; identical to SEQ ID NO: 696
  Synthetic

SEQ ID NO: 705 - protein, 107 aa, Artificial Sequence
  Synthetic
EIQMTQSPSSLSASVGDRVTITCKASQNVDTNVAWYQQKPGQAPKSLIYSASYRYSDVPSRFSGSASGTDFTLTISSVQSEDFATYYCQQYDSYPYTFGGGTKLEIK

SEQ ID NO: 706 - protein, 249 aa, Artificial Sequence
  Synthetic
EVQLVESGGGLVQPGGSLKLSCAASGFTFNKYAMNWVRQAPGKGMEWVARIRSKYNNYATYYADAVKDRFTISRDDSKNTLYLQMNNLKTEDTAVYYCVRAGNFGTSYISYWAYWGQGTLVTVSSGGGGSGGGGSGGGGSQTVVTQEPSLTVSPGGTVTITCGSSTGAVTSGNYPNWVQKKPGQAPRGLIGGTKFLAPGTPARFSGSLSGGKAALTLSGVQPEDEAEYYCVLWYSNRWVFGSGTKLTVL

SEQ ID NO: 707 - protein, 249 aa, Artificial Sequence
  Synthetic
EVQLVESGGGLVQPGGSLKLSCAASGFTFNKYAMNWVRQAPGKGMEWVARIRSKYNNYATYYADAVKDRFTISRDDSKNTLYLQMNNLKTEDTAVYYCVRAGNFGTSYISYWAYCGQGTLVTVSSGGGGSGGGGSGGGGSQTVVTQEPSLTVSPGGTVTITCGSSTGAVTSGNYPNWVQKKPGQCPRGLIGGTKFLAPGTPARFSGSLSGGKAALTLSGVQPEDEAEYYCVLWYSNRWVFGSGTKLTVL

SEQ ID NO: 708 - protein, 249 aa, Artificial Sequence
  Synthetic
EVQLVESGGGLVQPGGSLKLSCAASGFTFNKYAMNWVRQAPGKGMEWVARIRSKYNNYATYYADAVKDRFTISRDDSKNTLYLQMNNLKTEDTAVYYCVRAGNFGTSYISYWAYWGQGTLVTVSSGGGGQGGGGQGGGGQQTVVTQEPSLTVSPGGTVTITCGSSTGAVTSGNYPNWVQKKPGQAPRGLIGGTKFLAPGTPARFSGSLSGGKAALTLSGVQPEDEAEYYCVLWYSNRWVFGSGTKLTVL

SEQ ID NO: 709 - protein, 249 aa, Artificial Sequence
  Synthetic
EVQLVESGGGLVQPGGSLKLSCAASGFTFNKYAMNWVRQAPGKGMEWVARIRSKYNNYATYYADAVKDRFTISRDDSKNTLYLQMNNLKTEDTAVYYCVRAGNFGTSYISYWAYCGQGTLVTVSSGGGGQGGGGQGGGGQQTVVTQEPSLTVSPGGTVTITCGSSTGAVTSGNYPNWVQKKPGQCPRGLIGGTKFLAPGTPARFSGSLSGGKAALTLSGVQPEDEAEYYCVLWYSNRWVFGSGTKLTVL

SEQ ID NO: 710 - protein, 249 aa, Artificial Sequence
  Synthetic
EVQLVESGGGLVQPGGSLKLSCAASGFTFNKYAINWVRQAPGKGLEWVARIRSKYNNYATYYADAVKDRFTISRDDSKNTVYLQMNNLKTEDTAVYYCARAGNFGSSYISYWAYWGQGTLVTVSSGGGGSGGGGSGGGGSQTVVTQEPSLTVSPGGTVTITCGSSTGAVTSGNYPNWVQKKPGQAPRGLIGGTKFLAPGTPARFSGSLSGGKAALTLSGVQPEDEAEYYCVLWYSNRWVFGSGTKLTVL

SEQ ID NO: 711 - protein, 249 aa, Artificial Sequence
  Synthetic
EVQLVESGGGLVQPGGSLKLSCAASGFTFNKYAINWVRQAPGKGLEWVARIRSKYNNYATYYADAVKDRFTISRDDSKNTVYLQMNNLKTEDTAVYYCARAGNFGSSYISYWAYCGQGTLVTVSSGGGGSGGGGSGGGGSQTVVTQEPSLTVSPGGTVTITCGSSTGAVTSGNYPNWVQKKPGQCPRGLIGGTKFLAPGTPARFSGSLSGGKAALTLSGVQPEDEAEYYCVLWYSNRWVFGSGTKLTVL

SEQ ID NO: 712 - protein, 249 aa, Artificial Sequence
  Synthetic
EVQLVESGGGLVQPGGSLKLSCAASGFTFNKYAINWVRQAPGKGLEWVARIRSKYNNYATYYADAVKDRFTISRDDSKNTVYLQMNNLKTEDTAVYYCARAGNFGSSYISYWAYWGQGTLVTVSSGGGGQGGGGQGGGGQQTVVTQEPSLTVSPGGTVTITCGSSTGAVTSGNYPNWVQKKPGQAPRGLIGGTKFLAPGTPARFSGSLSGGKAALTLSGVQPEDEAEYYCVLWYSNRWVFGSGTKLTVL

SEQ ID NO: 713 - protein, 249 aa, Artificial Sequence
  Synthetic
EVQLVESGGGLVQPGGSLKLSCAASGFTFNKYAINWVRQAPGKGLEWVARIRSKYNNYATYYADAVKDRFTISRDDSKNTVYLQMNNLKTEDTAVYYCARAGNFGSSYISYWAYCGQGTLVTVSSGGGGQGGGGQGGGGQQTVVTQEPSLTVSPGGTVTITCGSSTGAVTSGNYPNWVQKKPGQCPRGLIGGTKFLAPGTPARFSGSLSGGKAALTLSGVQPEDEAEYYCVLWYSNRWVFGSGTKLTVL

SEQ ID NO: 714 - protein, 249 aa, Artificial Sequence
  Synthetic
EVQLVESGGGLVQPGGSLKLSCAASGFTFNKYAMNWVRQAPGKGLEWVARIRSKYNNYATYYAEAVKGRFTISRDDSKNTVYLQMNNLKTEDTAVYYCVRNENIGTSYISYWAYWGQGTLVTVSSGGGGSGGGGSGGGGSQTVVTQEPSLTVSPGGTVTITCGSSTGAVTSGNYPNWVQQKPGQAPRGLIGGTKFLAPGTPARFSGSLSGGKAALTLSGVQPEDEAEYYCVLWYSNRWVFGSGTKLTVL

SEQ ID NO: 715 - protein, 249 aa, Artificial Sequence
  Synthetic
EVQLVESGGGLVQPGGSLKLSCAASGFTFNKYAMNWVRQAPGKGLEWVARIRSKYNNYATYYAEAVKGRFTISRDDSKNTVYLQMNNLKTEDTAVYYCVRNENIGTSYISYWAYCGQGTLVTVSSGGGGSGGGGSGGGGSQTVVTQEPSLTVSPGGTVTITCGSSTGAVTSGNYPNWVQQKPGQCPRGLIGGTKFLAPGTPARFSGSLSGGKAALTLSGVQPEDEAEYYCVLWYSNRWVFGSGTKLTVL

SEQ ID NO: 716 - protein, 249 aa, Artificial Sequence
  Synthetic
EVQLVESGGGLVQPGGSLKLSCAASGFTFNKYAMNWVRQAPGKGLEWVARIRSKYNNYATYYAEAVKGRFTISRDDSKNTVYLQMNNLKTEDTAVYYCVRNENIGTSYISYWAYWGQGTLVTVSSGGGGQGGGGQGGGGQQTVVTQEPSLTVSPGGTVTITCGSSTGAVTSGNYPNWVQQKPGQAPRGLIGGTKFLAPGTPARFSGSLSGGKAALTLSGVQPEDEAEYYCVLWYSNRWVFGSGTKLTVL

SEQ ID NO: 717 - protein, 249 aa, Artificial Sequence
  Synthetic
EVQLVESGGGLVQPGGSLKLSCAASGFTFNKYAMNWVRQAPGKGLEWVARIRSKYNNYATYYAEAVKGRFTISRDDSKNTVYLQMNNLKTEDTAVYYCVRNENIGTSYISYWAYCGQGTLVTVSSGGGGQGGGGQGGGGQQTVVTQEPSLTVSPGGTVTITCGSSTGAVTSGNYPNWVQQKPGQCPRGLIGGTKFLAPGTPARFSGSLSGGKAALTLSGVQPEDEAEYYCVLWYSNRWVFGSGTKLTVL

SEQ ID NO: 718 - protein, 249 aa, Artificial Sequence
  Synthetic
EVQLVESGGGLVQPGGSLKLSCAASGFTFNKYAINWVREAPGKGLEWVARIRSKYNNYATYYADAVKDRFTISRDDSKNTAYLQMNNLKTEDTAVYYCVRNANFGTSYISYFAYWGQGTLVTVSSGGGGSGGGGSGGGGSQTVVTQEPSLTVSPGGTVTLTCGSSTGAVTSGNYPNWVQKKPGQAPRGLIGGTKFLAPGTPARFSGSLLGGKAALTLSGVQPEDEAEYYCVLWYSNRWVFGSGTKLTVL

SEQ ID NO: 719 - protein, 249 aa, Artificial Sequence
  Synthetic
EVQLVESGGGLVQPGGSLKLSCAASGFTFNKYAINWVREAPGKGLEWVARIRSKYNNYATYYADAVKDRFTISRDDSKNTAYLQMNNLKTEDTAVYYCVRNANFGTSYISYFAYCGQGTLVTVSSGGGGSGGGGSGGGGSQTVVTQEPSLTVSPGGTVTLTCGSSTGAVTSGNYPNWVQKKPGQCPRGLIGGTKFLAPGTPARFSGSLLGGKAALTLSGVQPEDEAEYYCVLWYSNRWVFGSGTKLTVL

SEQ ID NO: 720 - protein, 249 aa, Artificial Sequence
  Synthetic
EVQLVESGGGLVQPGGSLKLSCAASGFTFNKYAINWVREAPGKGLEWVARIRSKYNNYATYYADAVKDRFTISRDDSKNTAYLQMNNLKTEDTAVYYCVRNANFGTSYISYFAYWGQGTLVTVSSGGGGQGGGGQGGGGQQTVVTQEPSLTVSPGGTVTLTCGSSTGAVTSGNYPNWVQKKPGQAPRGLIGGTKFLAPGTPARFSGSLLGGKAALTLSGVQPEDEAEYYCVLWYSNRWVFGSGTKLTVL

SEQ ID NO: 721 - protein, 249 aa, Artificial Sequence
  Synthetic
EVQLVESGGGLVQPGGSLKLSCAASGFTFNKYAINWVREAPGKGLEWVARIRSKYNNYATYYADAVKDRFTISRDDSKNTAYLQMNNLKTEDTAVYYCVRNANFGTSYISYFAYCGQGTLVTVSSGGGGQGGGGQGGGGQQTVVTQEPSLTVSPGGTVTLTCGSSTGAVTSGNYPNWVQKKPGQCPRGLIGGTKFLAPGTPARFSGSLLGGKAALTLSGVQPEDEAEYYCVLWYSNRWVFGSGTKLTVL

SEQ ID NO: 722 - protein, 249 aa, Artificial Sequence
  Synthetic
EVQLVESGGGLVQPGGSLKLSCAASGFTFNKYAMNWVRQAPGKGMEWVARIRSKYNNYATYYADAVKDRFTISRDDSKNTLYLQMNNLKTEDTAVYYCVRAGNFGSSYISYFAYWGQGTLVTVSSGGGGSGGGGSGGGGSQTVVTQEPSLTVSPGGTVTITCGSSTGAVTSGNYPNWIQKKPGQAPRGLIGGTKFLAPGTPARFSGSLEGGKAALTLSGVQPEDEAEYYCVLYYSNRWVFGSGTKLTVL

SEQ ID NO: 723 - protein, 249 aa, Artificial Sequence
  Synthetic
EVQLVESGGGLVQPGGSLKLSCAASGFTFNKYAMNWVRQAPGKGMEWVARIRSKYNNYATYYADAVKDRFTISRDDSKNTLYLQMNNLKTEDTAVYYCVRAGNFGSSYISYFAYCGQGTLVTVSSGGGGSGGGGSGGGGSQTVVTQEPSLTVSPGGTVTITCGSSTGAVTSGNYPNWIQKKPGQCPRGLIGGTKFLAPGTPARFSGSLEGGKAALTLSGVQPEDEAEYYCVLYYSNRWVFGSGTKLTVL

SEQ ID NO: 724 - protein, 249 aa, Artificial Sequence
  Synthetic
EVQLVESGGGLVQPGGSLKLSCAASGFTFNKYAMNWVRQAPGKGMEWVARIRSKYNNYATYYADAVKDRFTISRDDSKNTLYLQMNNLKTEDTAVYYCVRAGNFGSSYISYFAYWGQGTLVTVSSGGGGQGGGGQGGGGQQTVVTQEPSLTVSPGGTVTITCGSSTGAVTSGNYPNWIQKKPGQAPRGLIGGTKFLAPGTPARFSGSLEGGKAALTLSGVQPEDEAEYYCVLYYSNRWVFGSGTKLTVL

SEQ ID NO: 725 - protein, 249 aa, Artificial Sequence
  Synthetic
EVQLVESGGGLVQPGGSLKLSCAASGFTFNKYAMNWVRQAPGKGMEWVARIRSKYNNYATYYADAVKDRFTISRDDSKNTLYLQMNNLKTEDTAVYYCVRAGNFGSSYISYFAYCGQGTLVTVSSGGGGQGGGGQGGGGQQTVVTQEPSLTVSPGGTVTITCGSSTGAVTSGNYPNWIQKKPGQCPRGLIGGTKFLAPGTPARFSGSLEGGKAALTLSGVQPEDEAEYYCVLYYSNRWVFGSGTKLTVL

SEQ ID NO: 726 - protein, 249 aa, Artificial Sequence
  Synthetic
EVQLVESGGGLVQPGGSLKLSCAASGFTFNKYAMNWVRQAPGKGLEWVARIRSKYNNYATYYADSVKDRFTISRDDSKNTAYLQMNNLKTEDTAVYYCVRHGNFGNSYISYWAYWGQGTLVTVSSGGGGSGGGGSGGGGSQTVVTQEPSLTVSPGGTVTLTCGSSTGAVTSGNYPNWVQQKPGQAPRGLIGGTKFLAPGTPARFSGSLLGGKAALTLSGVQPEDEAEYYCVLWYSNRWVFGGGTKLTVL

SEQ ID NO: 727 - protein, 249 aa, Artificial Sequence
  Synthetic
EVQLVESGGGLVQPGGSLKLSCAASGFTFNKYAMNWVRQAPGKGLEWVARIRSKYNNYATYYADSVKDRFTISRDDSKNTAYLQMNNLKTEDTAVYYCVRHGNFGNSYISYWAYCGQGTLVTVSSGGGGSGGGGSGGGGSQTVVTQEPSLTVSPGGTVTLTCGSSTGAVTSGNYPNWVQQKPGQCPRGLIGGTKFLAPGTPARFSGSLLGGKAALTLSGVQPEDEAEYYCVLWYSNRWVFGGGTKLTVL

SEQ ID NO: 728 - protein, 249 aa, Artificial Sequence
  Synthetic
EVQLVESGGGLVQPGGSLKLSCAASGFTFNKYAMNWVRQAPGKGLEWVARIRSKYNNYATYYADSVKDRFTISRDDSKNTAYLQMNNLKTEDTAVYYCVRHGNFGNSYISYWAYWGQGTLVTVSSGGGGQGGGGQGGGGQQTVVTQEPSLTVSPGGTVTLTCGSSTGAVTSGNYPNWVQQKPGQAPRGLIGGTKFLAPGTPARFSGSLLGGKAALTLSGVQPEDEAEYYCVLWYSNRWVFGGGTKLTVL

SEQ ID NO: 729 - protein, 249 aa, Artificial Sequence
  Synthetic
EVQLVESGGGLVQPGGSLKLSCAASGFTFNKYAMNWVRQAPGKGLEWVARIRSKYNNYATYYADSVKDRFTISRDDSKNTAYLQMNNLKTEDTAVYYCVRHGNFGNSYISYWAYCGQGTLVTVSSGGGGQGGGGQGGGGQQTVVTQEPSLTVSPGGTVTLTCGSSTGAVTSGNYPNWVQQKPGQCPRGLIGGTKFLAPGTPARFSGSLLGGKAALTLSGVQPEDEAEYYCVLWYSNRWVFGGGTKLTVL

SEQ ID NO: 730 - protein, 243 aa, Artificial Sequence
  Synthetic
QVQLVQSGAEVKKPGASVKVSCKASGYTFTNHIIHWVRQAPGQGLEWMGYINPYPGYHAYNEKFQGRATMTSDTSTSTVYMELSSLRSEDTAVYYCARDGYYRDTDVLDYWGQGTLVTVSSGGGGSGGGGSGGGGSDIQMTQSPSSLSASVGDRVTITCQASQDISNYLNWYQQKPGKAPKLLIYYTSRLHTGVPSRFSGSGSGTDFTFTISSLEPEDIATYYCQQGNTLPWTFGQGTKVEIK

SEQ ID NO: 731 - protein, 243 aa, Artificial Sequence
  Synthetic
QVQLVQSGAEVKKPGASVKVSCKASGYTFTNHIIHWVRQAPGQCLEWMGYINPYPGYHAYNEKFQGRATMTSDTSTSTVYMELSSLRSEDTAVYYCARDGYYRDTDVLDYWGQGTLVTVSSGGGGSGGGGSGGGGSDIQMTQSPSSLSASVGDRVTITCQASQDISNYLNWYQQKPGKAPKLLIYYTSRLHTGVPSRFSGSGSGTDFTFTISSLEPEDIATYYCQQGNTLPWTFGCGTKVEIK

SEQ ID NO: 732 - protein, 243 aa, Artificial Sequence
  Synthetic
QVQLVQSGAEVKKPGASVKVSCKASGYTFTNHIIHWVRQAPGQCLEWMGYINPYPGYHAYNEKFQGRATMTSDTSTSTVYMELSSLRSEDTAVYYCARDGYYRDTDVLDYWGQGTLVTVSSGGGGQGGGGQGGGGQEIQMTQSPSSLSASVGDRVTITCQASQDISNYLNWYQQKPGKAPKLLIYYTSRLHTGVPSRFSGSGSGTDFTFTISSLEPEDIATYYCQQGNTLPWTFGCGTKVEIK

SEQ ID NO: 733 - protein, 243 aa, Artificial Sequence
  Synthetic
QVQLVQSGAEVKKPGASVKVSCKASGYTFTNHIIHWVRQAPGQGLEWMGYINPYPGYHAYNEKFQGRATMTSDTSTSTVYMELSSLRSEDTAVYYCARDGYYRDTDVLDYWGQGTLVTVSSGGGGQGGGGQGGGGQEIQMTQSPSSLSASVGDRVTITCQASQDISNYLNWYQQKPGKAPKLLIYYTSRLHTGVPSRFSGSGSGTDFTFTISSLEPEDIATYYCQQGNTLPWTFGQGTKVEIK

SEQ ID NO: 734 - protein, 247 aa, Artificial Sequence
  Synthetic
EVQLLESGGGLVQPGGSLRLSCAASGFTFSHYAMSWVRQAPGKCLEWVSAVSGGGDKTLYADAVKGRFTISRDNSKNTLFLQMNSLRAEDTAIYYCARLRGFYYGMDVWGQGTTVTVSSGGGGSGGGGSGGGGSDIVLTQSPLSLPVTPGEPASISCRSSQSLLHSNKYNYLDWYLQKPGQSPQLLIYLGSNRASGVPDRFSGSGSGTDFTLKISRVEAEDVGVYYCMQALQTPPITFGCGTRLEIK

SEQ ID NO: 735 - protein, 247 aa, Artificial Sequence
  Synthetic
EVQLLESGGGLVQPGGSLRLSCAASGFTFSHYAMSWVRQAPGKCLEWVSAVSGGGDKTLYADAVKGRFTISRDNSKNTLFLQMNSLRAEDTAIYYCARLRGFYYGMDVWGQGTTVTVSSGGGGQGGGGQGGGGQEIVLTQSPLSLPVTPGEPASISCRSSQSLLHSNKYNYLDWYLQKPGQSPQLLIYLGSNRASGVPDRFSGSGSGTDFTLKISRVEAEDVGVYYCMQALQTPPITFGCGTRLEIK

SEQ ID NO: 736 - protein, 249 aa, Artificial Sequence
  Synthetic
DIVMTQSPLSLPVISGEPASISCRSSQSLLHKNAFNYLDWYLQKPGQSPQLLIYLGSNRASGVPDRFSGSGSGTDFTLKISRVEAEDVGVYYCMQALQTPFTFGCGTKVDIKGGGGSGGGGSGGGGSQVQLVESGGGVVQPGRSLRLSCAASGFTFSSYGMHWVRQAPGKCLEWVAVISYEGSNKYYAESVKGRFTISRDNSKNTLYLQMNSLRDEDTAVYYCARDRGTIFGNYGLEVWGQGTTVTVSS

SEQ ID NO: 737 - protein, 249 aa, Artificial Sequence
  Synthetic
DIVMTQSPLSLPVISGEPASISCRSSQSLLHKNAFNYLDWYLQKPGQSPQLLIYLGSNRASGVPDRFSGSGSGTDFTLKISRVEAEDVGVYYCMQALQTPFTFGCGTKVDIKGGGGQGGGGQGGGGQQVQLVESGGGVVQPGRSLRLSCAASGFTFSSYGMHWVRQAPGKCLEWVAVISYEGSNKYYAESVKGRFTISRDNSKNTLYLQMNSLRDEDTAVYYCARDRGTIFGNYGLEVWGQGTTVTVSS

SEQ ID NO: 738 - protein, 250 aa, Artificial Sequence
  Synthetic
QVQLVQSGAEVKKPGESVKVSCKASGYTFTNYGMNWVKQAPGQGLEWMGWINTYTGEPTYADKFQGRVTMTTDTSTSTAYMEIRNLGGDDTAVYYCARWSWSDGYYVYFDYWGQGTSVTVSSGGGGSGGGGSGGGGSDIVMTQSPDSLTVSLGERTTINCKSSQSVLDSSTNKNSLAWYQQKPGQPPKLLLSWASTRESGIPDRFSGSGSGTDFTLTIDSPQPEDSATYYCQQSAHFPITFGQGTRLEIK

SEQ ID NO: 739 - protein, 250 aa, Artificial Sequence
  Synthetic
QVQLVQSGAEVKKPGESVKVSCKASGYTFTNYGMNWVKQAPGQCLEWMGWINTYTGEPTYADKFQGRVTMTTDTSTSTAYMEIRNLGGDDTAVYYCARWSWSDGYYVYFDYWGQGTSVTVSSGGGGSGGGGSGGGGSDIVMTQSPDSLTVSLGERTTINCKSSQSVLDSSTNKNSLAWYQQKPGQPPKLLLSWASTRESGIPDRFSGSGSGTDFTLTIDSPQPEDSATYYCQQSAHFPITFGCGTRLEIK

SEQ ID NO: 740 - protein, 250 aa, Artificial Sequence
  Synthetic
QVQLVQSGAEVKKPGESVKVSCKASGYTFTNYGMNWVKQAPGQCLEWMGWINTYTGEPTYADKFQGRVTMTTDTSTSTAYMEIRNLGGDDTAVYYCARWSWSDGYYVYFDYWGQGTSVTVSSGGGGQGGGGQGGGGQDIVMTQSPDSLTVSLGERTTINCKSSQSVLDSSTNKNSLAWYQQKPGQPPKLLLSWASTRESGIPDRFSGSGSGTDFTLTIDSPQPEDSATYYCQQSAHFPITFGCGTRLEIK

SEQ ID NO: 741 - protein, 250 aa, Artificial Sequence
  Synthetic
QVQLVQSGAEVKKPGESVKVSCKASGYTFTNYGMNWVKQAPGQCLEWMGWINTYTGEPTYADKFQGRVTMTTDTSTSTAYMEIRNLGGDDTAVYYCARWSWSDGYYVYFDYWGQGTSVTVSSGGGGRGGGGRGGGGRDIVMTQSPDSLTVSLGERTTINCKSSQSVLDSSTNKNSLAWYQQKPGQPPKLLLSWASTRESGIPDRFSGSGSGTDFTLTIDSPQPEDSATYYCQQSAHFPITFGCGTRLEIK

SEQ ID NO: 742 - protein, 250 aa, Artificial Sequence
  Synthetic
QVQLVQSGAEVKKPGESVKVSCKASGYTFTNYGMNWVKQAPGQCLEWMGWINTYTGEPTYADKFQGRVTMTTDTSTSTAYMEIRNLGGDDTAVYYCARWSWSDGYYVYFDYWGQGTSVTVSSGGGGQGGGGQGGGGQEIVMTQSPDSLTVSLGERTTINCKSSQSVLDSSTNKNSLAWYQQKPGQPPKLLLSWASTRESGIPDRFSGSGSGTDFTLTIDSPQPEDSATYYCQQSAHFPITFGCGTRLEIK

SEQ ID NO: 743 - protein, 250 aa, Artificial Sequence
  Synthetic
QVQLVQSGAEVKKPGESVKVSCKASGYTFTNYGMNWVKQAPGQGLEWMGWINTYTGEPTYADKFQGRVTMTTDTSTSTAYMEIRNLGGDDTAVYYCARWSWSDGYYVYFDYWGQGTSVTVSSGGGGQGGGGQGGGGQEIVMTQSPDSLTVSLGERTTINCKSSQSVLDSSTNKNSLAWYQQKPGQPPKLLLSWASTRESGIPDRFSGSGSGTDFTLTIDSPQPEDSATYYCQQSAHFPITFGQGTRLEIK

SEQ ID NO: 744 - protein, 243 aa, Artificial Sequence
  Synthetic
EVQLLESGGGMVQPGGSLRLSCAASGFTFSTYAMSWVRQAPGKCLEWVSAISGSGGRTFYAESVEGRFTISRDNSKNTLYLQMNSLRAEDTAVYYCAKHDYSNYPYFDYWGQGTLVTVSSGGGGSGGGGSGGGGSEIVLTQSPGTLSLSPGERATLSCRASQSVRSTYLAWYQQKPGQAPRLLIYGASSRATGIPDRFSGSGSGTDFTLTISRLEPEDFAVYSCQQYGDLPFTFGCGTKLEIK

SEQ ID NO: 745 - protein, 243 aa, Artificial Sequence
  Synthetic
EVQLLESGGGMVQPGGSLRLSCAASGFTFSTYAMSWVRQAPGKCLEWVSAISGSGGRTFYAESVEGRFTISRDNSKNTLYLQMNSLRAEDTAVYYCAKHDYSNYPYFDYWGQGTLVTVSSGGGGQGGGGQGGGGQEIVLTQSPGTLSLSPGERATLSCRASQSVRSTYLAWYQQKPGQAPRLLIYGASSRATGIPDRFSGSGSGTDFTLTISRLEPEDFAVYSCQQYGDLPFTFGCGTKLEIK

SEQ ID NO: 746 - protein, 246 aa, Artificial Sequence
  Synthetic
QVQLVESGGGVVQPGGSLRLSCAASGFTFSSYGMHWVRQAPGKCLEWVAFIWYEGSNKYYAESVKDRFTISRDNSKNTLYLQMNSLRAEDTAVYYCARRAGIIGTIGYYYGMDVWGQGTTVTVSSGGGGSGGGGSGGGGSSYELTQPPSVSVSPGQTASITCSGDRLGEKYTSWYQQRPGQSPLLVIYQDTKRPSGIPERFSGSNSGNTATLTISGTQAMDEADYYCQAWESSTVVFGCGTKLTVL

SEQ ID NO: 747 - protein, 246 aa, Artificial Sequence
  Synthetic
QVQLVESGGGVVQPGGSLRLSCAASGFTFSSYGMHWVRQAPGKCLEWVAFIWYEGSNKYYAESVKDRFTISRDNSKNTLYLQMNSLRAEDTAVYYCARRAGIIGTIGYYYGMDVWGQGTTVTVSSGGGGQGGGGQGGGGQSYELTQPPSVSVSPGQTASITCSGDRLGEKYTSWYQQRPGQSPLLVIYQDTKRPSGIPERFSGSNSGNTATLTISGTQAMDEADYYCQAWESSTVVFGCGTKLTVL

SEQ ID NO: 748 - protein, 239 aa, Artificial Sequence
  Synthetic
QVQLVQSGAEVKKPGASVKVSCKASGYTFTNYWMNWVRQAPGQCLEWMGNIAYGVKGTNYNQKFQGRVTMTVDTSSSTAYMELSRLRSDDTAVYYCATRYFYVMDYWGQGTLVTVSSGGGGSGGGGSGGGGSDIQMTQSPSSLSASVGDRVTITCRASQDISNYLNWYQQKPGKVPKLLIYYTSRLHSGVPSRFSGSGSGTDFTLTISSLQPEDVATYYCVQYAQFPLTFGCGTKVEIK

SEQ ID NO: 749 - protein, 239 aa, Artificial Sequence
  Synthetic
QVQLVQSGAEVKKPGASVKVSCKASGYTFTNYWMNWVRQAPGQCLEWMGNIAYGVKGTNYNQKFQGRVTMTVDTSSSTAYMELSRLRSDDTAVYYCATRYFYVMDYWGQGTLVTVSSGGGGQGGGGQGGGGQDIQMTQSPSSLSASVGDRVTITCRASQDISNYLNWYQQKPGKVPKLLIYYTSRLHSGVPSRFSGSGSGTDFTLTISSLQPEDVATYYCVQYAQFPLTFGCGTKVEIK

SEQ ID NO: 750 - protein, 239 aa, Artificial Sequence
  Synthetic
QVQLVQSGAEVKKPGASVKVSCKASGYTFTNYWMNWVRQAPGQCLEWMGNIAYGVKGTNYNQKFQGRVTMTVDTSSSTAYMELSRLRSDDTAVYYCATRYFYVMDYWGQGTLVTVSSGGGGQGGGGQGGGGQEIQMTQSPSSLSASVGDRVTITCRASQDISNYLNWYQQKPGKVPKLLIYYTSRLHSGVPSRFSGSGSGTDFTLTISSLQPEDVATYYCVQYAQFPLTFGCGTKVEIK

SEQ ID NO: 751 - protein, 251 aa, Artificial Sequence
  Synthetic
EVQLLESGGGLVQPGGSLRLSCAASGFSFSSYPINWVRQAPGKGLEWVGVIWTGGGTNYASSVKGRFTISRDNSKNTVYLQMNSLRAEDTAVYYCAKSRGVYDFDGRGAMDYWGQGTLVTVSSGGGGSGGGGSGGGGSDIVMTQSPDSLAVSLGERATINCKSSQSLLYSSNQKNYFAWYQQKPGQPPKLLIYWASTRESGVPDRFSGSGSGTDFTLTISSLQAEDVAVYYCQQYYSYPYTFGQGTKLEIK

SEQ ID NO: 752 - protein, 251 aa, Artificial Sequence
  Synthetic
EVQLLESGGGLVQPGGSLRLSCAASGFSFSSYPINWVRQAPGKGLEWVGVIWTGGGTNYASSVKGRFTISRDNSKNTVYLQMNSLRAEDTAVYYCAKSRGVYDFDGRGAMDYWGQGTLVTVSSGGGGQGGGGQGGGGQEIVMTQSPDSLAVSLGERATINCKSSQSLLYSSNQKNYFAWYQQKPGQPPKLLIYWASTRESGVPDRFSGSGSGTDFTLTISSLQAEDVAVYYCQQYYSYPYTFGQGTKLEIK

SEQ ID NO: 753 - protein, 247 aa, Artificial Sequence
  Synthetic
QVQLVQSGAEVKKPGASVKVSCKASGYTFTGYYMHWVRQAPGQCLEWMGWINPNSGGTKYAQKFQGRVTMTRDTSISTAYMELSRLRSDDTAVYYCARDRITVAGTYYYYGMDVWGQGTTVTVSSGGGGSGGGGSGGGGSDIQMTQSPSSVSASVGDRVTITCRASQGVNNWLAWYQQKPGKAPKLLIYTASSLQSGVPSRFSGSGSGTDFTLTIRSLQPEDFATYYCQQANSFPITFGCGTRLEIK

SEQ ID NO: 754 - protein, 247 aa, Artificial Sequence
  Synthetic
QVQLVQSGAEVKKPGASVKVSCKASGYTFTGYYMHWVRQAPGQCLEWMGWINPNSGGTKYAQKFQGRVTMTRDTSISTAYMELSRLRSDDTAVYYCARDRITVAGTYYYYGMDVWGQGTTVTVSSGGGGQGGGGQGGGGQEIQMTQSPSSVSASVGDRVTITCRASQGVNNWLAWYQQKPGKAPKLLIYTASSLQSGVPSRFSGSGSGTDFTLTIRSLQPEDFATYYCQQANSFPITFGCGTRLEIK

SEQ ID NO: 755 - protein, 244 aa, Artificial Sequence
  Synthetic
QVQLVQSGAEVKKPGASVKVSCKASGYTFTNYYMHWVRQAPGQCLEWMGWINPTSGGANYAQKFQGRVTMTRDTSISTAYMELSRLRSDDTAVYFCARESHAIQEGIWFDYWGQGTLVTVSSGGGGSGGGGSGGGGSDIQMTQSPSSLSASVGDRVTISCRASQSISNYLNWYQQKPGKAPKLLIYDASSLQSGVPSRFSGSGSGTDFTLTISSLQPEDFATYYCQQSYSFPLTFGCGTKVEIK

SEQ ID NO: 756 - protein, 244 aa, Artificial Sequence
  Synthetic
QVQLVQSGAEVKKPGASVKVSCKASGYTFTNYYMHWVRQAPGQCLEWMGWINPTSGGANYAQKFQGRVTMTRDTSISTAYMELSRLRSDDTAVYFCARESHAIQEGIWFDYWGQGTLVTVSSGGGGQGGGGQGGGGQEIQMTQSPSSLSASVGDRVTISCRASQSISNYLNWYQQKPGKAPKLLIYDASSLQSGVPSRFSGSGSGTDFTLTISSLQPEDFATYYCQQSYSFPLTFGCGTKVEIK

SEQ ID NO: 757 - protein, 252 aa, Artificial Sequence
  Synthetic
EIVLTQSPGTLSLSPGERATLSCRASQSVSSSYLAWYQQKPGQAPRLLIYGASSRATGIPDRFSGSGSGTDFTLTISRLEPEDFAVYYCQQYGSSPLTFGCGTKLEIKGGGGSGGGGSGGGGSQVQLVQSGAEVKKPGASVKVSCKASGYTFTGYYMHWVRQAPGQCLEWMGWINPNSGETNYAQKFQGRVTMTRDTSISTAYMELSRLRSDDTAVYYCARDALIVVAPVTRDYYYYGMDVWGQGTTVTVSS

SEQ ID NO: 758 - protein, 252 aa, Artificial Sequence
  Synthetic
EIVLTQSPGTLSLSPGERATLSCRASQSVSSSYLAWYQQKPGQAPRLLIYGASSRATGIPDRFSGSGSGTDFTLTISRLEPEDFAVYYCQQYGSSPLTFGCGTKLEIKGGGGQGGGGQGGGGQQVQLVQSGAEVKKPGASVKVSCKASGYTFTGYYMHWVRQAPGQCLEWMGWINPNSGETNYAQKFQGRVTMTRDTSISTAYMELSRLRSDDTAVYYCARDALIVVAPVTRDYYYYGMDVWGQGTTVTVSS

SEQ ID NO: 759 - protein, 244 aa, Artificial Sequence
  Synthetic
DIQMTQSPSSLSASVGDRVTITCKASQDVSTAVAWYQQKPGKAPKLLIYSASYRYTGVPDRFTGSGSGTDFTLTISSLQPEDFATYYCQQHYSTPPYTFGCGTKVEIKRGGGGSGGGGSGGGGSQVQLVQSGAEVKKPGASVKVSCKASGYAFSSSWMNWVRQAPGQCLEWIGRIYPGDADAKYNAKFKGKATLTADKSTSTAYMELSSLRSEDTAVYYCARSTMIATGAMDYWGQGTLVTVSS

SEQ ID NO: 760 - protein, 243 aa, Artificial Sequence
  Synthetic
DIQMTQSPSSLSASVGDRVTITCKASQDVSTAVAWYQQKPGKAPKLLIYSASYRYTGVPDRFTGSGSGTDFTLTISSLQPEDFATYYCQQHYSTPPYTFGCGTKVEIKGGGGSGGGGSGGGGSQVQLVQSGAEVKKPGASVKVSCKASGYAFSSSWMNWVRQAPGQCLEWIGRIYPGDADAKYNAKFKGKATLTADKSTSTAYMELSSLRSEDTAVYYCARSTMIATGAMDYWGQGTLVTVSS

SEQ ID NO: 761 - protein, 243 aa, Artificial Sequence
  Synthetic
DIQMTQSPSSLSASVGDRVTITCKASQDVSTAVAWYQQKPGKAPKLLIYSASYRYTGVPDRFTGSGSGTDFTLTISSLQPEDFATYYCQQHYSTPPYTFGCGTKVEIKGGGGQGGGGQGGGGQQVQLVQSGAEVKKPGASVKVSCKASGYAFSSSWMNWVRQAPGQCLEWIGRIYPGDADAKYNAKFKGKATLTADKSTSTAYMELSSLRSEDTAVYYCARSTMIATGAMDYWGQGTLVTVSS

SEQ ID NO: 762 - protein, 241 aa, Artificial Sequence
  Synthetic
QVQLQESGPGLVKPSETLSLTCTVSGGSISSYYWSWIRQPPGKCLEWIGYVYYSGTTNYNPSLKSRVTISVDTSKNQFSLKLSSVTAADTAVYYCASIAVTGFYFDYWGQGTLVTVSSGGGGSGGGGSGGGGSEIVLTQSPGTLSLSPGERVTLSCRASQRVNNNYLAWYQQRPGQAPRLLIYGASSRATGIPDRFSGSGSGTDFTLTISRLEPEDFAVYYCQQYDRSPLTFGCGTKLEIK

SEQ ID NO: 763 - protein, 241 aa, Artificial Sequence
  Synthetic
QVQLQESGPGLVKPSETLSLTCTVSGGSISSYYWSWIRQPPGKCLEWIGYVYYSGTTNYNPSLKSRVTISVDTSKNQFSLKLSSVTAADTAVYYCASIAVTGFYFDYWGQGTLVTVSSGGGGQGGGGQGGGGQEIVLTQSPGTLSLSPGERVTLSCRASQRVNNNYLAWYQQRPGQAPRLLIYGASSRATGIPDRFSGSGSGTDFTLTISRLEPEDFAVYYCQQYDRSPLTFGCGTKLEIK

SEQ ID NO: 764 - protein, 251 aa, Artificial Sequence
  Synthetic
QVQLVESGGGVVQSGRSLRLSCAASGFTFRNYGMHWVRQAPGKCLEWVAVIWYDGSDKYYADSVRGRFTISRDNSKNTLYLQMNSLRAEDTAVYYCARDGYDILTGNPRDFDYWGQGTLVTVSSGGGGSGGGGSGGGGSDTVMTQTPLSSHVTLGQPASISCRSSQSLVHSDGNTYLSWLQQRPGQPPRLLIYRISRRFSGVPDRFSGSGAGTDFTLEISRVEAEDVGVYYCMQSTHVPRTFGCGTKVEIK

SEQ ID NO: 765 - protein, 251 aa, Artificial Sequence
  Synthetic
QVQLVESGGGVVQSGRSLRLSCAASGFTFRNYGMHWVRQAPGKCLEWVAVIWYDGSDKYYADSVRGRFTISRDNSKNTLYLQMNSLRAEDTAVYYCARDGYDILTGNPRDFDYWGQGTLVTVSSGGGGQGGGGQGGGGQDTVMTQTPLSSHVTLGQPASISCRSSQSLVHSDGNTYLSWLQQRPGQPPRLLIYRISRRFSGVPDRFSGSGAGTDFTLEISRVEAEDVGVYYCMQSTHVPRTFGCGTKVEIK

SEQ ID NO: 766 - protein, 246 aa, Artificial Sequence
  Synthetic
QVTLKESGPTLVKPTETLTLTCTLSGFSLNNARMGVSWIRQPPGKCLEWLAHIFSNDEKSYSTSLKNRLTISKDSSKTQVVLTMTNVDPVDTATYYCARIVGYGSGWYGFFDYWGQGTLVTVSSGGGGSGGGGSGGGGSDIQMTQSPSSLSASVGDRVTITCRASQGIRNDLGWYQQKPGKAPKRLIYAASTLQSGVPSRFSGSGSGTEFTLTISSLQPEDFATYYCLQHNSYPLTFGCGTKVEIK

SEQ ID NO: 767 - protein, 246 aa, Artificial Sequence
  Synthetic
QVTLKESGPTLVKPTETLTLTCTLSGFSLNNARMGVSWIRQPPGKCLEWLAHIFSNDEKSYSTSLKNRLTISKDSSKTQVVLTMTNVDPVDTATYYCARIVGYGSGWYGFFDYWGQGTLVTVSSGGGGQGGGGQGGGGQEIQMTQSPSSLSASVGDRVTITCRASQGIRNDLGWYQQKPGKAPKRLIYAASTLQSGVPSRFSGSGSGTEFTLTISSLQPEDFATYYCLQHNSYPLTFGCGTKVEIK

SEQ ID NO: 768 - protein, 249 aa, Artificial Sequence
  Synthetic
EVQLVESGGGLVQPGGSLRLSCAASGFTFSNAWMSWVRQAPGKCLEWVGRIRSRSYGGTTDYAAPVKGRFTISRDDSKNTLFLQMNSLKTEDTAVYYCTTPSYSGSYYNYFSVMDVWGQGTTVTVSSGGGGSGGGGSGGGGSDIQMTQSPSSLSASVGDRVTITCRTSQSISSYLNWYQQKPGRAPKLLIFAASSLQGGVPSRFSGSGSGTDFTLTISSLQPEDFATYYCQQTYSMPFTFGCGTKVEIK

SEQ ID NO: 769 - protein, 249 aa, Artificial Sequence
  Synthetic
EVQLVESGGGLVQPGGSLRLSCAASGFTFSNAWMSWVRQAPGKCLEWVGRIRSRSYGGTTDYAAPVKGRFTISRDDSKNTLFLQMNSLKTEDTAVYYCTTPSYSGSYYNYFSVMDVWGQGTTVTVSSGGGGQGGGGQGGGGQEIQMTQSPSSLSASVGDRVTITCRTSQSISSYLNWYQQKPGRAPKLLIFAASSLQGGVPSRFSGSGSGTDFTLTISSLQPEDFATYYCQQTYSMPFTFGCGTKVEIK

SEQ ID NO: 770 - protein, 242 aa, Artificial Sequence
  Synthetic
EVQLLESGGGLVQPGGSLRLSCAASGFTFSSYAMSWVRQAPGKCLEWVSAISGSGGGTYYAASVKGRFTISRDNSKNTLYLQMSSLRAEDTAVYYCATGKGVHLGFDYWGQGTLVTVSSGGGGSGGGGSGGGGSSYVLTQPPSVSVAPGQTARITCGGNNIGSKSVHWYQQKPGQAPVMVVYDDNDRPSGIPERFSGSNSGNTATLTISRVEAGDEADYYCQVWDYSGQRQVFGCGTKLTVL

SEQ ID NO: 771 - protein, 242 aa, Artificial Sequence
  Synthetic
EVQLLESGGGLVQPGGSLRLSCAASGFTFSSYAMSWVRQAPGKCLEWVSAISGSGGGTYYAASVKGRFTISRDNSKNTLYLQMSSLRAEDTAVYYCATGKGVHLGFDYWGQGTLVTVSSGGGGQGGGGQGGGGQSYVLTQPPSVSVAPGQTARITCGGNNIGSKSVHWYQQKPGQAPVMVVYDDNDRPSGIPERFSGSNSGNTATLTISRVEAGDEADYYCQVWDYSGQRQVFGCGTKLTVL

SEQ ID NO: 772 - protein, 243 aa, Artificial Sequence
  Synthetic
QVQLQESGPGLVKPSETLSLTCTVSGGSISSSSYFWGWIRQPPGKCLEWIGNIYYSGSSNYNPSLKSRVTISVDTSKNQFSLKLSSVTAADTAVYYCARLPRGDRDAFDIWGQGTMVTVSSGGGGSGGGGSGGGGSDIVMTQSPSSLSASVGDRVTITCRASQGISNYLAWYQQKPGKVPKLLIYAASTLQSGVPSRFSGSGSGTDFTLTISSLQPEDFATYYCQQSYSTPFTFGCGTKVEIK

SEQ ID NO: 773 - protein, 243 aa, Artificial Sequence
  Synthetic
QVQLQESGPGLVKPSETLSLTCTVSGGSISSSSYFWGWIRQPPGKCLEWIGNIYYSGSSNYNPSLKSRVTISVDTSKNQFSLKLSSVTAADTAVYYCARLPRGDRDAFDIWGQGTMVTVSSGGGGQGGGGQGGGGQDIVMTQSPSSLSASVGDRVTITCRASQGISNYLAWYQQKPGKVPKLLIYAASTLQSGVPSRFSGSGSGTDFTLTISSLQPEDFATYYCQQSYSTPFTFGCGTKVEIK

SEQ ID NO: 774 - protein, 243 aa, Artificial Sequence
  Synthetic
QVQLQESGPGLVKPSETLSLTCTVSGGSISSSSYFWGWIRQPPGKCLEWIGNIYYSGSSNYNPSLKSRVTISVDTSKNQFSLKLSSVTAADTAVYYCARLPRGDRDAFDIWGQGTMVTVSSGGGGQGGGGQGGGGQEIVMTQSPSSLSASVGDRVTITCRASQGISNYLAWYQQKPGKVPKLLIYAASTLQSGVPSRFSGSGSGTDFTLTISSLQPEDFATYYCQQSYSTPFTFGCGTKVEIK

SEQ ID NO: 775 - protein, 239 aa, Artificial Sequence
  Synthetic
QVQLVESGGGLVKPGGSLRLSCAASGFTFSDYYMTWIRQAPGKGLEWLSYISSSGSTIYYADSVKGRFTISRDNAKNSLFLQMNSLRAEDTAVYYCARDRNSHFDYWGQGTLVTVSSGGGGSGGGGSGGGGSDIQMTQSPSSVSASVGDRVTITCRASQGINTWLAWYQQKPGKAPKLLIYGASGLQSGVPSRFSGSGSGTDFTLTISSLQPEDFATYYCQQAKSFPRTFGQGTKVEIK

SEQ ID NO: 776 - protein, 239 aa, Artificial Sequence
  Synthetic
QVQLVESGGGLVKPGGSLRLSCAASGFTFSDYYMTWIRQAPGKGLEWLSYISSSGSTIYYADSVKGRFTISRDNAKNSLFLQMNSLRAEDTAVYYCARDRNSHFDYWGQGTLVTVSSGGGGQGGGGQGGGGQEIQMTQSPSSVSASVGDRVTITCRASQGINTWLAWYQQKPGKAPKLLIYGASGLQSGVPSRFSGSGSGTDFTLTISSLQPEDFATYYCQQAKSFPRTFGQGTKVEIK

SEQ ID NO: 777 - protein, 241 aa, Artificial Sequence
  Synthetic
QVQLQQWGAGLLKPSETLSLTCAVYGGSFSGYYWSWIRQPPGKCLEWIGDIDASGSTKYNPSLKSRVTISLDTSKNQFSLKLNSVTAADTAVYFCARKKYSTVWSYFDNWGQGTLVTVSSGGGGSGGGGSGGGGSSYELTQPSSVSVPPGQTASITCSGDKLGDKYASWYQQKPGQSPVLVIYQDRKRPSGVPERFSGSNSGNTATLTISGTQAMDEADYYCQAWGSSTAVFGCGTKLTVL

SEQ ID NO: 778 - protein, 241 aa, Artificial Sequence
  Synthetic
QVQLQQWGAGLLKPSETLSLTCAVYGGSFSGYYWSWIRQPPGKCLEWIGDIDASGSTKYNPSLKSRVTISLDTSKNQFSLKLNSVTAADTAVYFCARKKYSTVWSYFDNWGQGTLVTVSSGGGGQGGGGQGGGGQSYELTQPSSVSVPPGQTASITCSGDKLGDKYASWYQQKPGQSPVLVIYQDRKRPSGVPERFSGSNSGNTATLTISGTQAMDEADYYCQAWGSSTAVFGCGTKLTVL

SEQ ID NO: 779 - protein, 243 aa, Artificial Sequence
  Synthetic
QVQLVESGGGLVKPGESLRLSCAASGFTFSDYYMYWVRQAPGKGLEWVAIISDGGYYTYYSDIIKGRFTISRDNAKNSLYLQMNSLKAEDTAVYYCARGFPLLRHGAMDYWGQGTLVTVSSGGGGSGGGGSGGGGSDIQMTQSPSSLSASVGDRVTITCKASQNVDTNVAWYQQKPGQAPKSLIYSASYRYSDVPSRFSGSASGTDFTLTISSVQSEDFATYYCQQYDSYPYTFGGGTKLEIK

SEQ ID NO: 780 - protein, 243 aa, Artificial Sequence
  Synthetic
QVQLVESGGGLVKPGESLRLSCAASGFTFSDYYMYWVRQAPGKCLEWVAIISDGGYYTYYSDIIKGRFTISRDNAKNSLYLQMNSLKAEDTAVYYCARGFPLLRHGAMDYWGQGTLVTVSSGGGGSGGGGSGGGGSDIQMTQSPSSLSASVGDRVTITCKASQNVDTNVAWYQQKPGQAPKSLIYSASYVYWDVPSRFSGSASGTDFTLTISSVQSEDFATYYCQQYDQQLITFGCGTKLEIK

SEQ ID NO: 781 - protein, 243 aa, Artificial Sequence
  Synthetic
QVQLVESGGGLVKPGESLRLSCAASGFTFSDYYMYWVRQAPGKCLEWVAIISDGGYYTYYSDIIKGRFTISRDNAKNSLYLQMNSLKAEDTAVYYCARGFPLLRHGAMDYWGQGTLVTVSSGGGGQGGGGQGGGGQDIQMTQSPSSLSASVGDRVTITCKASQNVDTNVAWYQQKPGQAPKSLIYSASYVYWDVPSRFSGSASGTDFTLTISSVQSEDFATYYCQQYDQQLITFGCGTKLEIK

SEQ ID NO: 782 - protein, 243 aa, Artificial Sequence
  Synthetic
QVQLVESGGGLVKPGESLRLSCAASGFTFSDYYMYWVRQAPGKCLEWVAIISDGGYYTYYSDIIKGRFTISRDNAKNSLYLQMNSLKAEDTAVYYCARGFPLLRHGAMDYWGQGTLVTVSSGGGGQGGGGQGGGGQEIQMTQSPSSLSASVGDRVTITCKASQNVDTNVAWYQQKPGQAPKSLIYSASYVYWDVPSRFSGSASGTDFTLTISSVQSEDFATYYCQQYDQQLITFGCGTKLEIK

SEQ ID NO: 783 - protein, 243 aa, Artificial Sequence
  Synthetic
QVQLVESGGGLVKPGESLRLSCAASGFTFSDYYMYWVRQAPGKGLEWVAIISDGGYYTYYSDIIKGRFTISRDNAKNSLYLQMNSLKAEDTAVYYCARGFPLLRHGAMDYWGQGTLVTVSSGGGGQGGGGQGGGGQEIQMTQSPSSLSASVGDRVTITCKASQNVDTNVAWYQQKPGQAPKSLIYSASYRYSDVPSRFSGSASGTDFTLTISSVQSEDFATYYCQQYDSYPYTFGGGTKLEIK

SEQ ID NO: 784 - protein, 498 aa, Artificial Sequence
  Synthetic
QVQLVQSGAEVKKPGASVKVSCKASGYTFTNHIIHWVRQAPGQGLEWMGYINPYPGYHAYNEKFQGRATMTSDTSTSTVYMELSSLRSEDTAVYYCARDGYYRDTDVLDYWGQGTLVTVSSGGGGQGGGGQGGGGQEIQMTQSPSSLSASVGDRVTITCQASQDISNYLNWYQQKPGKAPKLLIYYTSRLHTGVPSRFSGSGSGTDFTFTISSLEPEDIATYYCQQGNTLPWTFGQGTKVEIKSGGGGQEVQLVESGGGLVQPGGSLKLSCAASGFTFNKYAMNWVRQAPGKGLEWVARIRSKYNNYATYYADSVKDRFTISRDDSKNTAYLQMNNLKTEDTAVYYCVRHGNFGNSYISYWAYWGQGTLVTVSSGGGGQGGGGQGGGGQQTVVTQEPSLTVSPGGTVTLTCGSSTGAVTSGNYPNWVQQKPGQAPRGLIGGTKFLAPGTPARFSGSLLGGKAALTLSGVQPEDEAEYYCVLWYSNRWVFGGGTKLTVL

SEQ ID NO: 785 - protein, 498 aa, Artificial Sequence
  Synthetic
QVQLVQSGAEVKKPGASVKVSCKASGYTFTNHIIHWVRQAPGQGLEWMGYINPYPGYHAYNEKFQGRATMTSDTSTSTVYMELSSLRSEDTAVYYCARDGYYRDTDVLDYWGQGTLVTVSSGGGGSGGGGSGGGGSDIQMTQSPSSLSASVGDRVTITCQASQDISNYLNWYQQKPGKAPKLLIYYTSRLHTGVPSRFSGSGSGTDFTFTISSLEPEDIATYYCQQGNTLPWTFGQGTKVEIKSGGGGSEVQLVESGGGLVQPGGSLKLSCAASGFTFNKYAMNWVRQAPGKGLEWVARIRSKYNNYATYYADSVKDRFTISRDDSKNTAYLQMNNLKTEDTAVYYCVRHGNFGNSYISYWAYWGQGTLVTVSSGGGGSGGGGSGGGGSQTVVTQEPSLTVSPGGTVTLTCGSSTGAVTSGNYPNWVQQKPGQAPRGLIGGTKFLAPGTPARFSGSLLGGKAALTLSGVQPEDEAEYYCVLWYSNRWVFGGGTKLTVL

SEQ ID NO: 786 - protein, 505 aa, Artificial Sequence
  Synthetic
QVQLVQSGAEVKKPGESVKVSCKASGYTFTNYGMNWVKQAPGQGLEWMGWINTYTGEPTYADKFQGRVTMTTDTSTSTAYMEIRNLGGDDTAVYYCARWSWSDGYYVYFDYWGQGTSVTVSSGGGGQGGGGQGGGGQEIVMTQSPDSLTVSLGERTTINCKSSQSVLDSSTNKNSLAWYQQKPGQPPKLLLSWASTRESGIPDRFSGSGSGTDFTLTIDSPQPEDSATYYCQQSAHFPITFGQGTRLEIKSGGGGQEVQLVESGGGLVQPGGSLKLSCAASGFTFNKYAMNWVRQAPGKGLEWVARIRSKYNNYATYYADSVKDRFTISRDDSKNTAYLQMNNLKTEDTAVYYCVRHGNFGNSYISYWAYWGQGTLVTVSSGGGGQGGGGQGGGGQQTVVTQEPSLTVSPGGTVTLTCGSSTGAVTSGNYPNWVQQKPGQAPRGLIGGTKFLAPGTPARFSGSLLGGKAALTLSGVQPEDEAEYYCVLWYSNRWVFGGGTKLTVL

SEQ ID NO: 787 - protein, 505 aa, Artificial Sequence
  Synthetic
QVQLVQSGAEVKKPGESVKVSCKASGYTFTNYGMNWVKQAPGQGLEWMGWINTYTGEPTYADKFQGRVTMTTDTSTSTAYMEIRNLGGDDTAVYYCARWSWSDGYYVYFDYWGQGTSVTVSSGGGGSGGGGSGGGGSDIVMTQSPDSLTVSLGERTTINCKSSQSVLDSSTNKNSLAWYQQKPGQPPKLLLSWASTRESGIPDRFSGSGSGTDFTLTIDSPQPEDSATYYCQQSAHFPITFGQGTRLEIKSGGGGSEVQLVESGGGLVQPGGSLKLSCAASGFTFNKYAMNWVRQAPGKGLEWVARIRSKYNNYATYYADSVKDRFTISRDDSKNTAYLQMNNLKTEDTAVYYCVRHGNFGNSYISYWAYWGQGTLVTVSSGGGGSGGGGSGGGGSQTVVTQEPSLTVSPGGTVTLTCGSSTGAVTSGNYPNWVQQKPGQAPRGLIGGTKFLAPGTPARFSGSLLGGKAALTLSGVQPEDEAEYYCVLWYSNRWVFGGGTKLTVL

SEQ ID NO: 788 - protein, 506 aa, Artificial Sequence
  Synthetic
QVQLVESGGGVVQSGRSLRLSCAASGFTFRNYGMHWVRQAPGKCLEWVAVIWYDGSDKYYADSVRGRFTISRDNSKNTLYLQMNSLRAEDTAVYYCARDGYDILTGNPRDFDYWGQGTLVTVSSGGGGSGGGGSGGGGSDTVMTQTPLSSHVTLGQPASISCRSSQSLVHSDGNTYLSWLQQRPGQPPRLLIYRISRRFSGVPDRFSGSGAGTDFTLEISRVEAEDVGVYYCMQSTHVPRTFGCGTKVEIKSGGGGSEVQLVESGGGLVQPGGSLKLSCAASGFTFNKYAMNWVRQAPGKGLEWVARIRSKYNNYATYYADSVKDRFTISRDDSKNTAYLQMNNLKTEDTAVYYCVRHGNFGNSYISYWAYWGQGTLVTVSSGGGGSGGGGSGGGGSQTVVTQEPSLTVSPGGTVTLTCGSSTGAVTSGNYPNWVQQKPGQAPRGLIGGTKFLAPGTPARFSGSLLGGKAALTLSGVQPEDEAEYYCVLWYSNRWVFGGGTKLTVL

SEQ ID NO: 789 - protein, 506 aa, Artificial Sequence
  Synthetic
QVQLVESGGGVVQSGRSLRLSCAASGFTFRNYGMHWVRQAPGKCLEWVAVIWYDGSDKYYADSVRGRFTISRDNSKNTLYLQMNSLRAEDTAVYYCARDGYDILTGNPRDFDYWGQGTLVTVSSGGGGQGGGGQGGGGQDTVMTQTPLSSHVTLGQPASISCRSSQSLVHSDGNTYLSWLQQRPGQPPRLLIYRISRRFSGVPDRFSGSGAGTDFTLEISRVEAEDVGVYYCMQSTHVPRTFGCGTKVEIKSGGGGQEVQLVESGGGLVQPGGSLKLSCAASGFTFNKYAMNWVRQAPGKGLEWVARIRSKYNNYATYYADSVKDRFTISRDDSKNTAYLQMNNLKTEDTAVYYCVRHGNFGNSYISYWAYWGQGTLVTVSSGGGGQGGGGQGGGGQQTVVTQEPSLTVSPGGTVTLTCGSSTGAVTSGNYPNWVQQKPGQAPRGLIGGTKFLAPGTPARFSGSLLGGKAALTLSGVQPEDEAEYYCVLWYSNRWVFGGGTKLTVL

SEQ ID NO: 790 - protein, 498 aa, Artificial Sequence
  Synthetic
QVQLVESGGGLVKPGESLRLSCAASGFTFSDYYMYWVRQAPGKGLEWVAIISDGGYYTYYSDIIKGRFTISRDNAKNSLYLQMNSLKAEDTAVYYCARGFPLLRHGAMDYWGQGTLVTVSSGGGGQGGGGQGGGGQEIQMTQSPSSLSASVGDRVTITCKASQNVDTNVAWYQQKPGQAPKSLIYSASYRYSDVPSRFSGSASGTDFTLTISSVQSEDFATYYCQQYDSYPYTFGGGTKLEIKSGGGGQEVQLVESGGGLVQPGGSLKLSCAASGFTFNKYAMNWVRQAPGKGLEWVARIRSKYNNYATYYADSVKDRFTISRDDSKNTAYLQMNNLKTEDTAVYYCVRHGNFGNSYISYWAYWGQGTLVTVSSGGGGQGGGGQGGGGQQTVVTQEPSLTVSPGGTVTLTCGSSTGAVTSGNYPNWVQQKPGQAPRGLIGGTKFLAPGTPARFSGSLLGGKAALTLSGVQPEDEAEYYCVLWYSNRWVFGGGTKLTVL

SEQ ID NO: 791 - protein, 498 aa, Artificial Sequence
  Synthetic
QVQLVESGGGLVKPGESLRLSCAASGFTFSDYYMYWVRQAPGKGLEWVAIISDGGYYTYYSDIIKGRFTISRDNAKNSLYLQMNSLKAEDTAVYYCARGFPLLRHGAMDYWGQGTLVTVSSGGGGSGGGGSGGGGSDIQMTQSPSSLSASVGDRVTITCKASQNVDTNVAWYQQKPGQAPKSLIYSASYRYSDVPSRFSGSASGTDFTLTISSVQSEDFATYYCQQYDSYPYTFGGGTKLEIKSGGGGSEVQLVESGGGLVQPGGSLKLSCAASGFTFNKYAMNWVRQAPGKGLEWVARIRSKYNNYATYYADSVKDRFTISRDDSKNTAYLQMNNLKTEDTAVYYCVRHGNFGNSYISYWAYWGQGTLVTVSSGGGGSGGGGSGGGGSQTVVTQEPSLTVSPGGTVTLTCGSSTGAVTSGNYPNWVQQKPGQAPRGLIGGTKFLAPGTPARFSGSLLGGKAALTLSGVQPEDEAEYYCVLWYSNRWVFGGGTKLTVL

SEQ ID NO: 792 - protein, 986 aa, Artificial Sequence
  Synthetic
QVQLVESGGGLVKPGESLRLSCAASGFTFSDYYMYWVRQAPGKCLEWVAIISDGGYYTYYSDIIKGRFTISRDNAKNSLYLQMNSLKAEDTAVYYCARGFPLLRHGAMDYWGQGTLVTVSSGGGGSGGGGSGGGGSDIQMTQSPSSLSASVGDRVTITCKASQNVDTNVAWYQQKPGQAPKSLIYSASYVYWDVPSRFSGSASGTDFTLTISSVQSEDFATYYCQQYDQQLITFGCGTKLEIKSGGGGSEVQLVESGGGLVQPGGSLKLSCAASGFTFNKYAMNWVRQAPGKGLEWVARIRSKYNNYATYYADSVKDRFTISRDDSKNTAYLQMNNLKTEDTAVYYCVRHGNFGNSYISYWAYCGQGTLVTVSSGGGGSGGGGSGGGGSQTVVTQEPSLTVSPGGTVTLTCGSSTGAVTSGNYPNWVQQKPGQCPRGLIGGTKFLAPGTPARFSGSLLGGKAALTLSGVQPEDEAEYYCVLWYSNRWVFGGGTKLTVLGGGGDKTHTCPPCPAPELLGGPSVFLFPPKPKDTLMISRTPEVTCVVVDVSHEDPEVKFNWYVDGVEVHNAKTKPCEEQYGSTYRCVSVLTVLHQDWLNGKEYKCKVSNKALPAPIEKTISKAKGQPREPQVYTLPPSREEMTKNQVSLTCLVKGFYPSDIAVEWESNGQPENNYKTTPPVLDSDGSFFLYSKLTVDKSRWQQGNVFSCSVMHEALHNHYTQKSLSLSPGKGGGGSGGGGSGGGGSGGGGSGGGGSGGGGSDKTHTCPPCPAPELLGGPSVFLFPPKPKDTLMISRTPEVTCVVVDVSHEDPEVKFNWYVDGVEVHNAKTKPCEEQYGSTYRCVSVLTVLHQDWLNGKEYKCKVSNKALPAPIEKTISKAKGQPREPQVYTLPPSREEMTKNQVSLTCLVKGFYPSDIAVEWESNGQPENNYKTTPPVLDSDGSFFLYSKLTVDKSRWQQGNVFSCSVMHEALHNHYTQKSLSLSPGK

SEQ ID NO: 793 - protein, 986 aa, Artificial Sequence
  Synthetic
QVQLVQSGAEVKKPGASVKVSCKASGYTFTNHIIHWVRQAPGQCLEWMGYINPYPGYHAYNEKFQGRATMTSDTSTSTVYMELSSLRSEDTAVYYCARDGYYRDTDVLDYWGQGTLVTVSSGGGGSGGGGSGGGGSDIQMTQSPSSLSASVGDRVTITCQASQDISNYLNWYQQKPGKAPKLLIYYTSRLHTGVPSRFSGSGSGTDFTFTISSLEPEDIATYYCQQGNTLPWTFGCGTKVEIKSGGGGSEVQLVESGGGLVQPGGSLKLSCAASGFTFNKYAMNWVRQAPGKGLEWVARIRSKYNNYATYYADSVKDRFTISRDDSKNTAYLQMNNLKTEDTAVYYCVRHGNFGNSYISYWAYWGQGTLVTVSSGGGGSGGGGSGGGGSQTVVTQEPSLTVSPGGTVTLTCGSSTGAVTSGNYPNWVQQKPGQAPRGLIGGTKFLAPGTPARFSGSLLGGKAALTLSGVQPEDEAEYYCVLWYSNRWVFGGGTKLTVLGGGGDKTHTCPPCPAPELLGGPSVFLFPPKPKDTLMISRTPEVTCVVVDVSHEDPEVKFNWYVDGVEVHNAKTKPCEEQYGSTYRCVSVLTVLHQDWLNGKEYKCKVSNKALPAPIEKTISKAKGQPREPQVYTLPPSREEMTKNQVSLTCLVKGFYPSDIAVEWESNGQPENNYKTTPPVLDSDGSFFLYSKLTVDKSRWQQGNVFSCSVMHEALHNHYTQKSLSLSPGKGGGGSGGGGSGGGGSGGGGSGGGGSGGGGSDKTHTCPPCPAPELLGGPSVFLFPPKPKDTLMISRTPEVTCVVVDVSHEDPEVKFNWYVDGVEVHNAKTKPCEEQYGSTYRCVSVLTVLHQDWLNGKEYKCKVSNKALPAPIEKTISKAKGQPREPQVYTLPPSREEMTKNQVSLTCLVKGFYPSDIAVEWESNGQPENNYKTTPPVLDSDGSFFLYSKLTVDKSRWQQGNVFSCSVMHEALHNHYTQKSLSLSPGK

SEQ ID NO: 794 - protein, 976 aa, Artificial Sequence
  Synthetic
QVQLVQSGAEVKKPGASVKVSCKASGYTFTNHIIHWVRQAPGQCLEWMGYINPYPGYHAYNEKFQGRATMTSDTSTSTVYMELSSLRSEDTAVYYCARDGYYRDTDVLDYWGQGTLVTVSSGGGGQGGGGQGGGGQEIQMTQSPSSLSASVGDRVTITCQASQDISNYLNWYQQKPGKAPKLLIYYTSRLHTGVPSRFSGSGSGTDFTFTISSLEPEDIATYYCQQGNTLPWTFGCGTKVEIKSGGGGQEVQLVESGGGLVQPGGSLKLSCAASGFTFNKYAMNWVRQAPGKGLEWVARIRSKYNNYATYYADSVKDRFTISRDDSKNTAYLQMNNLKTEDTAVYYCVRHGNFGNSYISYWAYWGQGTLVTVSSGGGGQGGGGQGGGGQQTVVTQEPSLTVSPGGTVTLTCGSSTGAVTSGNYPNWVQQKPGQAPRGLIGGTKFLAPGTPARFSGSLLGGKAALTLSGVQPEDEAEYYCVLWYSNRWVFGGGTKLTVLGGGGCPPCPAPELLGGPSVFLFPPKPKDTLMISRTPEVTCVVVDVSHEEPEVKFNWYVDGVEVHNAKTKPCEEQYGSTYRCVSVLTVLHQDWLNGKEYKCKVSNKALPAPIEKTISKAKGQPREPQVYTLPPSREEMTKNQVSLTCLVKGFYPSDIAVEWESNGQPENNYKTTPPVLDSDGSFFLYSKLTVDKSRWQQGNVFSCSVMHEALHNHYTQKSLSLSPGKGGGGQGGGGQGGGGQGGGGQGGGGQGGGGQCPPCPAPELLGGPSVFLFPPKPKDTLMISRTPEVTCVVVDVSHEEPEVKFNWYVDGVEVHNAKTKPCEEQYGSTYRCVSVLTVLHQDWLNGKEYKCKVSNKALPAPIEKTISKAKGQPREPQVYTLPPSREEMTKNQVSLTCLVKGFYPSDIAVEWESNGQPENNYKTTPPVLDSDGSFFLYSKLTVDKSRWQQGNVFSCSVMHEALHNHYTQKSLSLSPGK

SEQ ID NO: 795 - protein, 992 aa, Artificial Sequence
  Synthetic
DIVMTQSPLSLPVISGEPASISCRSSQSLLHKNAFNYLDWYLQKPGQSPQLLIYLGSNRASGVPDRFSGSGSGTDFTLKISRVEAEDVGVYYCMQALQTPFTFGCGTKVDIKGGGGSGGGGSGGGGSQVQLVESGGGVVQPGRSLRLSCAASGFTFSSYGMHWVRQAPGKCLEWVAVISYEGSNKYYAESVKGRFTISRDNSKNTLYLQMNSLRDEDTAVYYCARDRGTIFGNYGLEVWGQGTTVTVSSSGGGGSEVQLVESGGGLVQPGGSLKLSCAASGFTFNKYAMNWVRQAPGKGLEWVARIRSKYNNYATYYADSVKDRFTISRDDSKNTAYLQMNNLKTEDTAVYYCVRHGNFGNSYISYWAYWGQGTLVTVSSGGGGSGGGGSGGGGSQTVVTQEPSLTVSPGGTVTLTCGSSTGAVTSGNYPNWVQQKPGQAPRGLIGGTKFLAPGTPARFSGSLLGGKAALTLSGVQPEDEAEYYCVLWYSNRWVFGGGTKLTVLGGGGDKTHTCPPCPAPELLGGPSVFLFPPKPKDTLMISRTPEVTCVVVDVSHEDPEVKFNWYVDGVEVHNAKTKPCEEQYGSTYRCVSVLTVLHQDWLNGKEYKCKVSNKALPAPIEKTISKAKGQPREPQVYTLPPSREEMTKNQVSLTCLVKGFYPSDIAVEWESNGQPENNYKTTPPVLDSDGSFFLYSKLTVDKSRWQQGNVFSCSVMHEALHNHYTQKSLSLSPGKGGGGSGGGGSGGGGSGGGGSGGGGSGGGGSDKTHTCPPCPAPELLGGPSVFLFPPKPKDTLMISRTPEVTCVVVDVSHEDPEVKFNWYVDGVEVHNAKTKPCEEQYGSTYRCVSVLTVLHQDWLNGKEYKCKVSNKALPAPIEKTISKAKGQPREPQVYTLPPSREEMTKNQVSLTCLVKGFYPSDIAVEWESNGQPENNYKTTPPVLDSDGSFFLYSKLTVDKSRWQQGNVFSCSVMHEALHNHYTQKSLSLSPGK

SEQ ID NO: 796 - protein, 991 aa, Artificial Sequence
  Synthetic
DIVMTQSPLSLPVISGEPASISCRSSQSLLHKNAFNYLDWYLQKPGQSPQLLIYLGSNRASGVPDRFSGSGSGTDFTLKISRVEAEDVGVYYCMQALQTPFTFGCGTKVDIKGGGGSGGGGSGGGGSQVQLVESGGGVVQPGRSLRLSCAASGFTFSSYGMHWVRQAPGKCLEWVAVISYEGSNKYYAESVKGRFTISRDNSKNTLYLQMNSLRDEDTAVYYCARDRGTIFGNYGLEVWGQGTTVTVSSGGGGSEVQLVESGGGLVQPGGSLKLSCAASGFTFNKYAMNWVRQAPGKGLEWVARIRSKYNNYATYYADSVKDRFTISRDDSKNTAYLQMNNLKTEDTAVYYCVRHGNFGNSYISYWAYWGQGTLVTVSSGGGGSGGGGSGGGGSQTVVTQEPSLTVSPGGTVTLTCGSSTGAVTSGNYPNWVQQKPGQAPRGLIGGTKFLAPGTPARFSGSLLGGKAALTLSGVQPEDEAEYYCVLWYSNRWVFGGGTKLTVLGGGGDKTHTCPPCPAPELLGGPSVFLFPPKPKDTLMISRTPEVTCVVVDVSHEDPEVKFNWYVDGVEVHNAKTKPCEEQYGSTYRCVSVLTVLHQDWLNGKEYKCKVSNKALPAPIEKTISKAKGQPREPQVYTLPPSREEMTKNQVSLTCLVKGFYPSDIAVEWESNGQPENNYKTTPPVLDSDGSFFLYSKLTVDKSRWQQGNVFSCSVMHEALHNHYTQKSLSLSPGKGGGGSGGGGSGGGGSGGGGSGGGGSGGGGSDKTHTCPPCPAPELLGGPSVFLFPPKPKDTLMISRTPEVTCVVVDVSHEDPEVKFNWYVDGVEVHNAKTKPCEEQYGSTYRCVSVLTVLHQDWLNGKEYKCKVSNKALPAPIEKTISKAKGQPREPQVYTLPPSREEMTKNQVSLTCLVKGFYPSDIAVEWESNGQPENNYKTTPPVLDSDGSFFLYSKLTVDKSRWQQGNVFSCSVMHEALHNHYTQKSLSLSPGK

SEQ ID NO: 797 - protein, 981 aa, Artificial Sequence
  Synthetic
DIVMTQSPLSLPVISGEPASISCRSSQSLLHKNAFNYLDWYLQKPGQSPQLLIYLGSNRASGVPDRFSGSGSGTDFTLKISRVEAEDVGVYYCMQALQTPFTFGCGTKVDIKGGGGQGGGGQGGGGQQVQLVESGGGVVQPGRSLRLSCAASGFTFSSYGMHWVRQAPGKCLEWVAVISYEGSNKYYAESVKGRFTISRDNSKNTLYLQMNSLRDEDTAVYYCARDRGTIFGNYGLEVWGQGTTVTVSSGGGGQEVQLVESGGGLVQPGGSLKLSCAASGFTFNKYAMNWVRQAPGKGLEWVARIRSKYNNYATYYADSVKDRFTISRDDSKNTAYLQMNNLKTEDTAVYYCVRHGNFGNSYISYWAYWGQGTLVTVSSGGGGQGGGGQGGGGQQTVVTQEPSLTVSPGGTVTLTCGSSTGAVTSGNYPNWVQQKPGQAPRGLIGGTKFLAPGTPARFSGSLLGGKAALTLSGVQPEDEAEYYCVLWYSNRWVFGGGTKLTVLGGGGCPPCPAPELLGGPSVFLFPPKPKDTLMISRTPEVTCVVVDVSHEEPEVKFNWYVDGVEVHNAKTKPCEEQYGSTYRCVSVLTVLHQDWLNGKEYKCKVSNKALPAPIEKTISKAKGQPREPQVYTLPPSREEMTKNQVSLTCLVKGFYPSDIAVEWESNGQPENNYKTTPPVLDSDGSFFLYSKLTVDKSRWQQGNVFSCSVMHEALHNHYTQKSLSLSPGKGGGGQGGGGQGGGGQGGGGQGGGGQGGGGQCPPCPAPELLGGPSVFLFPPKPKDTLMISRTPEVTCVVVDVSHEEPEVKFNWYVDGVEVHNAKTKPCEEQYGSTYRCVSVLTVLHQDWLNGKEYKCKVSNKALPAPIEKTISKAKGQPREPQVYTLPPSREEMTKNQVSLTCLVKGFYPSDIAVEWESNGQPENNYKTTPPVLDSDGSFFLYSKLTVDKSRWQQGNVFSCSVMHEALHNHYTQKSLSLSPGK

SEQ ID NO: 798 - protein, 993 aa, Artificial Sequence
  Synthetic
QVQLVQSGAEVKKPGESVKVSCKASGYTFTNYGMNWVKQAPGQCLEWMGWINTYTGEPTYADKFQGRVTMTTDTSTSTAYMEIRNLGGDDTAVYYCARWSWSDGYYVYFDYWGQGTSVTVSSGGGGSGGGGSGGGGSDIVMTQSPDSLTVSLGERTTINCKSSQSVLDSSTNKNSLAWYQQKPGQPPKLLLSWASTRESGIPDRFSGSGSGTDFTLTIDSPQPEDSATYYCQQSAHFPITFGCGTRLEIKSGGGGSEVQLVESGGGLVQPGGSLKLSCAASGFTFNKYAMNWVRQAPGKGLEWVARIRSKYNNYATYYADSVKDRFTISRDDSKNTAYLQMNNLKTEDTAVYYCVRHGNFGNSYISYWAYWGQGTLVTVSSGGGGSGGGGSGGGGSQTVVTQEPSLTVSPGGTVTLTCGSSTGAVTSGNYPNWVQQKPGQAPRGLIGGTKFLAPGTPARFSGSLLGGKAALTLSGVQPEDEAEYYCVLWYSNRWVFGGGTKLTVLGGGGDKTHTCPPCPAPELLGGPSVFLFPPKPKDTLMISRTPEVTCVVVDVSHEDPEVKFNWYVDGVEVHNAKTKPCEEQYGSTYRCVSVLTVLHQDWLNGKEYKCKVSNKALPAPIEKTISKAKGQPREPQVYTLPPSREEMTKNQVSLTCLVKGFYPSDIAVEWESNGQPENNYKTTPPVLDSDGSFFLYSKLTVDKSRWQQGNVFSCSVMHEALHNHYTQKSLSLSPGKGGGGSGGGGSGGGGSGGGGSGGGGSGGGGSDKTHTCPPCPAPELLGGPSVFLFPPKPKDTLMISRTPEVTCVVVDVSHEDPEVKFNWYVDGVEVHNAKTKPCEEQYGSTYRCVSVLTVLHQDWLNGKEYKCKVSNKALPAPIEKTISKAKGQPREPQVYTLPPSREEMTKNQVSLTCLVKGFYPSDIAVEWESNGQPENNYKTTPPVLDSDGSFFLYSKLTVDKSRWQQGNVFSCSVMHEALHNHYTQKSLSLSPGK

SEQ ID NO: 799 - protein, 983 aa, Artificial Sequence
  Synthetic
QVQLVQSGAEVKKPGESVKVSCKASGYTFTNYGMNWVKQAPGQCLEWMGWINTYTGEPTYADKFQGRVTMTTDTSTSTAYMEIRNLGGDDTAVYYCARWSWSDGYYVYFDYWGQGTSVTVSSGGGGQGGGGQGGGGQEIVMTQSPDSLTVSLGERTTINCKSSQSVLDSSTNKNSLAWYQQKPGQPPKLLLSWASTRESGIPDRFSGSGSGTDFTLTIDSPQPEDSATYYCQQSAHFPITFGCGTRLEIKSGGGGQEVQLVESGGGLVQPGGSLKLSCAASGFTFNKYAMNWVRQAPGKGLEWVARIRSKYNNYATYYADSVKDRFTISRDDSKNTAYLQMNNLKTEDTAVYYCVRHGNFGNSYISYWAYWGQGTLVTVSSGGGGQGGGGQGGGGQQTVVTQEPSLTVSPGGTVTLTCGSSTGAVTSGNYPNWVQQKPGQAPRGLIGGTKFLAPGTPARFSGSLLGGKAALTLSGVQPEDEAEYYCVLWYSNRWVFGGGTKLTVLGGGGCPPCPAPELLGGPSVFLFPPKPKDTLMISRTPEVTCVVVDVSHEEPEVKFNWYVDGVEVHNAKTKPCEEQYGSTYRCVSVLTVLHQDWLNGKEYKCKVSNKALPAPIEKTISKAKGQPREPQVYTLPPSREEMTKNQVSLTCLVKGFYPSDIAVEWESNGQPENNYKTTPPVLDSDGSFFLYSKLTVDKSRWQQGNVFSCSVMHEALHNHYTQKSLSLSPGKGGGGQGGGGQGGGGQGGGGQGGGGQGGGGQCPPCPAPELLGGPSVFLFPPKPKDTLMISRTPEVTCVVVDVSHEEPEVKFNWYVDGVEVHNAKTKPCEEQYGSTYRCVSVLTVLHQDWLNGKEYKCKVSNKALPAPIEKTISKAKGQPREPQVYTLPPSREEMTKNQVSLTCLVKGFYPSDIAVEWESNGQPENNYKTTPPVLDSDGSFFLYSKLTVDKSRWQQGNVFSCSVMHEALHNHYTQKSLSLSPGK

SEQ ID NO: 800 - protein, 986 aa, Artificial Sequence
  Synthetic
EVQLLESGGGMVQPGGSLRLSCAASGFTFSTYAMSWVRQAPGKCLEWVSAISGSGGRTFYAESVEGRFTISRDNSKNTLYLQMNSLRAEDTAVYYCAKHDYSNYPYFDYWGQGTLVTVSSGGGGSGGGGSGGGGSEIVLTQSPGTLSLSPGERATLSCRASQSVRSTYLAWYQQKPGQAPRLLIYGASSRATGIPDRFSGSGSGTDFTLTISRLEPEDFAVYSCQQYGDLPFTFGCGTKLEIKSGGGGSEVQLVESGGGLVQPGGSLKLSCAASGFTFNKYAMNWVRQAPGKGLEWVARIRSKYNNYATYYADSVKDRFTISRDDSKNTAYLQMNNLKTEDTAVYYCVRHGNFGNSYISYWAYWGQGTLVTVSSGGGGSGGGGSGGGGSQTVVTQEPSLTVSPGGTVTLTCGSSTGAVTSGNYPNWVQQKPGQAPRGLIGGTKFLAPGTPARFSGSLLGGKAALTLSGVQPEDEAEYYCVLWYSNRWVFGGGTKLTVLGGGGDKTHTCPPCPAPELLGGPSVFLFPPKPKDTLMISRTPEVTCVVVDVSHEDPEVKFNWYVDGVEVHNAKTKPCEEQYGSTYRCVSVLTVLHQDWLNGKEYKCKVSNKALPAPIEKTISKAKGQPREPQVYTLPPSREEMTKNQVSLTCLVKGFYPSDIAVEWESNGQPENNYKTTPPVLDSDGSFFLYSKLTVDKSRWQQGNVFSCSVMHEALHNHYTQKSLSLSPGKGGGGSGGGGSGGGGSGGGGSGGGGSGGGGSDKTHTCPPCPAPELLGGPSVFLFPPKPKDTLMISRTPEVTCVVVDVSHEDPEVKFNWYVDGVEVHNAKTKPCEEQYGSTYRCVSVLTVLHQDWLNGKEYKCKVSNKALPAPIEKTISKAKGQPREPQVYTLPPSREEMTKNQVSLTCLVKGFYPSDIAVEWESNGQPENNYKTTPPVLDSDGSFFLYSKLTVDKSRWQQGNVFSCSVMHEALHNHYTQKSLSLSPGK

SEQ ID NO: 801 - protein, 976 aa, Artificial Sequence
  Synthetic
EVQLLESGGGMVQPGGSLRLSCAASGFTFSTYAMSWVRQAPGKCLEWVSAISGSGGRTFYAESVEGRFTISRDNSKNTLYLQMNSLRAEDTAVYYCAKHDYSNYPYFDYWGQGTLVTVSSGGGGQGGGGQGGGGQEIVLTQSPGTLSLSPGERATLSCRASQSVRSTYLAWYQQKPGQAPRLLIYGASSRATGIPDRFSGSGSGTDFTLTISRLEPEDFAVYSCQQYGDLPFTFGCGTKLEIKSGGGGQEVQLVESGGGLVQPGGSLKLSCAASGFTFNKYAMNWVRQAPGKGLEWVARIRSKYNNYATYYADSVKDRFTISRDDSKNTAYLQMNNLKTEDTAVYYCVRHGNFGNSYISYWAYWGQGTLVTVSSGGGGQGGGGQGGGGQQTVVTQEPSLTVSPGGTVTLTCGSSTGAVTSGNYPNWVQQKPGQAPRGLIGGTKFLAPGTPARFSGSLLGGKAALTLSGVQPEDEAEYYCVLWYSNRWVFGGGTKLTVLGGGGCPPCPAPELLGGPSVFLFPPKPKDTLMISRTPEVTCVVVDVSHEEPEVKFNWYVDGVEVHNAKTKPCEEQYGSTYRCVSVLTVLHQDWLNGKEYKCKVSNKALPAPIEKTISKAKGQPREPQVYTLPPSREEMTKNQVSLTCLVKGFYPSDIAVEWESNGQPENNYKTTPPVLDSDGSFFLYSKLTVDKSRWQQGNVFSCSVMHEALHNHYTQKSLSLSPGKGGGGQGGGGQGGGGQGGGGQGGGGQGGGGQCPPCPAPELLGGPSVFLFPPKPKDTLMISRTPEVTCVVVDVSHEEPEVKFNWYVDGVEVHNAKTKPCEEQYGSTYRCVSVLTVLHQDWLNGKEYKCKVSNKALPAPIEKTISKAKGQPREPQVYTLPPSREEMTKNQVSLTCLVKGFYPSDIAVEWESNGQPENNYKTTPPVLDSDGSFFLYSKLTVDKSRWQQGNVFSCSVMHEALHNHYTQKSLSLSPGK

SEQ ID NO: 802 - protein, 987 aa, Artificial Sequence
  Synthetic
QVQLVESGGGVVQPGGSLRLSCAASGFTFSSYGMHWVRQAPGKCLEWVAFIWYEGSNKYYAESVKDRFTISRDNSKNTLYLQMNSLRAEDTAVYYCARRAGIIGTIGYYYGMDVWGQGTTVTVSSGGGGSGGGGSGGGGSSYELTQPPSVSVSPGQTASITCSGDRLGEKYTSWYQQRPGQSPLLVIYQDTKRPSGIPERFSGSNSGNTATLTISGTQAMDEADYYCQAWESSTVVFGCGTKLTVLSGGGGSEVQLVESGGGLVQPGGSLKLSCAASGFTFNKYAMNWVRQAPGKGLEWVARIRSKYNNYATYYADSVKDRFTISRDDSKNTAYLQMNNLKTEDTAVYYCVRHGNFGNSYISYWAYWGQGTLVTVSSGGGGSGGGGSGGGGSQTVVTQEPSLTVSPGGTVTLTCGSSTGAVTSGNYPNWVQQKPGQAPRGLIGGTKFLAPGTPARFSGSLLGGKAALTLSGVQPEDEAEYYCVLWYSNRWVFGGGTKLTVLGGGGDKTHTCPPCPAPELLGGPSVFLFPPKPKDTLMISRTPEVTCVVVDVSHEDPEVKFNWYVDGVEVHNAKTKPCEEQYGSTYRCVSVLTVLHQDWLNGKEYKCKVSNKALPAPIEKTISKAKGQPREPQVYTLPPSREEMTKNQVSLTCLVKGFYPSDIAVEWESNGQPENNYKTTPPVLDSDGSFFLYSKLTVDKSRWQQGNVFSCSVMHEALHNHYTQKSLSLSPGGGGSGGGGSGGGGSGGGGSGGGGSGGGGSDKTHTCPPCPAPELLGGPSVFLFPPKPKDTLMISRTPEVTCVVVDVSHEDPEVKFNWYVDGVEVHNAKTKPCEEQYGSTYRCVSVLTVLHQDWLNGKEYKCKVSNKALPAPIEKTISKAKGQPREPQVYTLPPSREEMTKNQVSLTCLVKGFYPSDIAVEWESNGQPENNYKTTPPVLDSDGSFFLYSKLTVDKSRWQQGNVFSCSVMHEALHNHYTQKSLSLSPGK

SEQ ID NO: 803 - protein, 977 aa, Artificial Sequence
  Synthetic
QVQLVESGGGVVQPGGSLRLSCAASGFTFSSYGMHWVRQAPGKCLEWVAFIWYEGSNKYYAESVKDRFTISRDNSKNTLYLQMNSLRAEDTAVYYCARRAGIIGTIGYYYGMDVWGQGTTVTVSSGGGGQGGGGQGGGGQSYELTQPPSVSVSPGQTASITCSGDRLGEKYTSWYQQRPGQSPLLVIYQDTKRPSGIPERFSGSNSGNTATLTISGTQAMDEADYYCQAWESSTVVFGCGTKLTVLSGGGGQEVQLVESGGGLVQPGGSLKLSCAASGFTFNKYAMNWVRQAPGKGLEWVARIRSKYNNYATYYADSVKDRFTISRDDSKNTAYLQMNNLKTEDTAVYYCVRHGNFGNSYISYWAYWGQGTLVTVSSGGGGQGGGGQGGGGQQTVVTQEPSLTVSPGGTVTLTCGSSTGAVTSGNYPNWVQQKPGQAPRGLIGGTKFLAPGTPARFSGSLLGGKAALTLSGVQPEDEAEYYCVLWYSNRWVFGGGTKLTVLGGGGCPPCPAPELLGGPSVFLFPPKPKDTLMISRTPEVTCVVVDVSHEEPEVKFNWYVDGVEVHNAKTKPCEEQYGSTYRCVSVLTVLHQDWLNGKEYKCKVSNKALPAPIEKTISKAKGQPREPQVYTLPPSREEMTKNQVSLTCLVKGFYPSDIAVEWESNGQPENNYKTTPPVLDSDGSFFLYSKLTVDKSRWQQGNVFSCSVMHEALHNHYTQKSLSLSPGGGGQGGGGQGGGGQGGGGQGGGGQGGGGQCPPCPAPELLGGPSVFLFPPKPKDTLMISRTPEVTCVVVDVSHEEPEVKFNWYVDGVEVHNAKTKPCEEQYGSTYRCVSVLTVLHQDWLNGKEYKCKVSNKALPAPIEKTISKAKGQPREPQVYTLPPSREEMTKNQVSLTCLVKGFYPSDIAVEWESNGQPENNYKTTPPVLDSDGSFFLYSKLTVDKSRWQQGNVFSCSVMHEALHNHYTQKSLSLSPGK

SEQ ID NO: 804 - protein, 994 aa, Artificial Sequence
  Synthetic
EVQLLESGGGLVQPGGSLRLSCAASGFSFSSYPINWVRQAPGKGLEWVGVIWTGGGTNYASSVKGRFTISRDNSKNTVYLQMNSLRAEDTAVYYCAKSRGVYDFDGRGAMDYWGQGTLVTVSSGGGGSGGGGSGGGGSDIVMTQSPDSLAVSLGERATINCKSSQSLLYSSNQKNYFAWYQQKPGQPPKLLIYWASTRESGVPDRFSGSGSGTDFTLTISSLQAEDVAVYYCQQYYSYPYTFGQGTKLEIKSGGGGSEVQLVESGGGLVQPGGSLKLSCAASGFTFNKYAMNWVRQAPGKGLEWVARIRSKYNNYATYYADSVKDRFTISRDDSKNTAYLQMNNLKTEDTAVYYCVRHGNFGNSYISYWAYWGQGTLVTVSSGGGGSGGGGSGGGGSQTVVTQEPSLTVSPGGTVTLTCGSSTGAVTSGNYPNWVQQKPGQAPRGLIGGTKFLAPGTPARFSGSLLGGKAALTLSGVQPEDEAEYYCVLWYSNRWVFGGGTKLTVLGGGGDKTHTCPPCPAPELLGGPSVFLFPPKPKDTLMISRTPEVTCVVVDVSHEDPEVKFNWYVDGVEVHNAKTKPCEEQYGSTYRCVSVLTVLHQDWLNGKEYKCKVSNKALPAPIEKTISKAKGQPREPQVYTLPPSREEMTKNQVSLTCLVKGFYPSDIAVEWESNGQPENNYKTTPPVLDSDGSFFLYSKLTVDKSRWQQGNVFSCSVMHEALHNHYTQKSLSLSPGKGGGGSGGGGSGGGGSGGGGSGGGGSGGGGSDKTHTCPPCPAPELLGGPSVFLFPPKPKDTLMISRTPEVTCVVVDVSHEDPEVKFNWYVDGVEVHNAKTKPCEEQYGSTYRCVSVLTVLHQDWLNGKEYKCKVSNKALPAPIEKTISKAKGQPREPQVYTLPPSREEMTKNQVSLTCLVKGFYPSDIAVEWESNGQPENNYKTTPPVLDSDGSFFLYSKLTVDKSRWQQGNVFSCSVMHEALHNHYTQKSLSLSPGK

SEQ ID NO: 805 - protein, 729 aa, Artificial Sequence
  Synthetic
EVQLLESGGGLVQPGGSLRLSCAASGFSFSSYPINWVRQAPGKGLEWVGVIWTGGGTNYASSVKGRFTISRDNSKNTVYLQMNSLRAEDTAVYYCAKSRGVYDFDGRGAMDYWGQGTLVTVSSGGGGQGGGGQGGGGQEIVMTQSPDSLAVSLGERATINCKSSQSLLYSSNQKNYFAWYQQKPGQPPKLLIYWASTRESGVPDRFSGSGSGTDFTLTISSLQAEDVAVYYCQQYYSYPYTFGQGTKLEIKGGGGCPPCPAPELLGGPSVFLFPPKPKDTLMISRTPEVTCVVVDVSHEEPEVKFNWYVDGVEVHNAKTKPCEEQYGSTYRCVSVLTVLHQDWLNGKEYKCKVSNKALPAPIEKTISKAKGQPREPQVYTLPPSREEMTKNQVSLTCLVKGFYPSDIAVEWESNGQPENNYKTTPPVLDSDGSFFLYSKLTVDKSRWQQGNVFSCSVMHEALHNHYTQKSLSLSPGKGGGGQGGGGQGGGGQGGGGQGGGGQGGGGQCPPCPAPELLGGPSVFLFPPKPKDTLMISRTPEVTCVVVDVSHEEPEVKFNWYVDGVEVHNAKTKPCEEQYGSTYRCVSVLTVLHQDWLNGKEYKCKVSNKALPAPIEKTISKAKGQPREPQVYTLPPSREEMTKNQVSLTCLVKGFYPSDIAVEWESNGQPENNYKTTPPVLDSDGSFFLYSKLTVDKSRWQQGNVFSCSVMHEALHNHYTQKSLSLSPGK

SEQ ID NO: 806 - protein, 977 aa, Artificial Sequence
  Synthetic
QVQLVQSGAEVKKPGASVKVSCKASGYTFTNYYMHWVRQAPGQCLEWMGWINPTSGGANYAQKFQGRVTMTRDTSISTAYMELSRLRSDDTAVYFCARESHAIQEGIWFDYWGQGTLVTVSSGGGGQGGGGQGGGGQEIQMTQSPSSLSASVGDRVTISCRASQSISNYLNWYQQKPGKAPKLLIYDASSLQSGVPSRFSGSGSGTDFTLTISSLQPEDFATYYCQQSYSFPLTFGCGTKVEIKSGGGGQEVQLVESGGGLVQPGGSLKLSCAASGFTFNKYAMNWVRQAPGKGLEWVARIRSKYNNYATYYADSVKDRFTISRDDSKNTAYLQMNNLKTEDTAVYYCVRHGNFGNSYISYWAYWGQGTLVTVSSGGGGQGGGGQGGGGQQTVVTQEPSLTVSPGGTVTLTCGSSTGAVTSGNYPNWVQQKPGQAPRGLIGGTKFLAPGTPARFSGSLLGGKAALTLSGVQPEDEAEYYCVLWYSNRWVFGGGTKLTVLGGGGCPPCPAPELLGGPSVFLFPPKPKDTLMISRTPEVTCVVVDVSHEEPEVKFNWYVDGVEVHNAKTKPCEEQYGSTYRCVSVLTVLHQDWLNGKEYKCKVSNKALPAPIEKTISKAKGQPREPQVYTLPPSREEMTKNQVSLTCLVKGFYPSDIAVEWESNGQPENNYKTTPPVLDSDGSFFLYSKLTVDKSRWQQGNVFSCSVMHEALHNHYTQKSLSLSPGKGGGGQGGGGQGGGGQGGGGQGGGGQGGGGQCPPCPAPELLGGPSVFLFPPKPKDTLMISRTPEVTCVVVDVSHEEPEVKFNWYVDGVEVHNAKTKPCEEQYGSTYRCVSVLTVLHQDWLNGKEYKCKVSNKALPAPIEKTISKAKGQPREPQVYTLPPSREEMTKNQVSLTCLVKGFYPSDIAVEWESNGQPENNYKTTPPVLDSDGSFFLYSKLTVDKSRWQQGNVFSCSVMHEALHNHYTQKSLSLSPGK

SEQ ID NO: 807 - protein, 987 aa, Artificial Sequence
  Synthetic
QVQLVQSGAEVKKPGASVKVSCKASGYTFTNYYMHWVRQAPGQCLEWMGWINPTSGGANYAQKFQGRVTMTRDTSISTAYMELSRLRSDDTAVYFCARESHAIQEGIWFDYWGQGTLVTVSSGGGGSGGGGSGGGGSDIQMTQSPSSLSASVGDRVTISCRASQSISNYLNWYQQKPGKAPKLLIYDASSLQSGVPSRFSGSGSGTDFTLTISSLQPEDFATYYCQQSYSFPLTFGCGTKVEIKSGGGGSEVQLVESGGGLVQPGGSLKLSCAASGFTFNKYAMNWVRQAPGKGLEWVARIRSKYNNYATYYADSVKDRFTISRDDSKNTAYLQMNNLKTEDTAVYYCVRHGNFGNSYISYWAYWGQGTLVTVSSGGGGSGGGGSGGGGSQTVVTQEPSLTVSPGGTVTLTCGSSTGAVTSGNYPNWVQQKPGQAPRGLIGGTKFLAPGTPARFSGSLLGGKAALTLSGVQPEDEAEYYCVLWYSNRWVFGGGTKLTVLGGGGDKTHTCPPCPAPELLGGPSVFLFPPKPKDTLMISRTPEVTCVVVDVSHEDPEVKFNWYVDGVEVHNAKTKPCEEQYGSTYRCVSVLTVLHQDWLNGKEYKCKVSNKALPAPIEKTISKAKGQPREPQVYTLPPSREEMTKNQVSLTCLVKGFYPSDIAVEWESNGQPENNYKTTPPVLDSDGSFFLYSKLTVDKSRWQQGNVFSCSVMHEALHNHYTQKSLSLSPGKGGGGSGGGGSGGGGSGGGGSGGGGSGGGGSDKTHTCPPCPAPELLGGPSVFLFPPKPKDTLMISRTPEVTCVVVDVSHEDPEVKFNWYVDGVEVHNAKTKPCEEQYGSTYRCVSVLTVLHQDWLNGKEYKCKVSNKALPAPIEKTISKAKGQPREPQVYTLPPSREEMTKNQVSLTCLVKGFYPSDIAVEWESNGQPENNYKTTPPVLDSDGSFFLYSKLTVDKSRWQQGNVFSCSVMHEALHNHYTQKSLSLSPGK

SEQ ID NO: 808 - protein, 995 aa, Artificial Sequence
  Synthetic
EIVLTQSPGTLSLSPGERATLSCRASQSVSSSYLAWYQQKPGQAPRLLIYGASSRATGIPDRFSGSGSGTDFTLTISRLEPEDFAVYYCQQYGSSPLTFGCGTKLEIKGGGGSGGGGSGGGGSQVQLVQSGAEVKKPGASVKVSCKASGYTFTGYYMHWVRQAPGQCLEWMGWINPNSGETNYAQKFQGRVTMTRDTSISTAYMELSRLRSDDTAVYYCARDALIVVAPVTRDYYYYGMDVWGQGTTVTVSSSGGGGSEVQLVESGGGLVQPGGSLKLSCAASGFTFNKYAMNWVRQAPGKGLEWVARIRSKYNNYATYYADSVKDRFTISRDDSKNTAYLQMNNLKTEDTAVYYCVRHGNFGNSYISYWAYWGQGTLVTVSSGGGGSGGGGSGGGGSQTVVTQEPSLTVSPGGTVTLTCGSSTGAVTSGNYPNWVQQKPGQAPRGLIGGTKFLAPGTPARFSGSLLGGKAALTLSGVQPEDEAEYYCVLWYSNRWVFGGGTKLTVLGGGGDKTHTCPPCPAPELLGGPSVFLFPPKPKDTLMISRTPEVTCVVVDVSHEDPEVKFNWYVDGVEVHNAKTKPCEEQYGSTYRCVSVLTVLHQDWLNGKEYKCKVSNKALPAPIEKTISKAKGQPREPQVYTLPPSREEMTKNQVSLTCLVKGFYPSDIAVEWESNGQPENNYKTTPPVLDSDGSFFLYSKLTVDKSRWQQGNVFSCSVMHEALHNHYTQKSLSLSPGKGGGGSGGGGSGGGGSGGGGSGGGGSGGGGSDKTHTCPPCPAPELLGGPSVFLFPPKPKDTLMISRTPEVTCVVVDVSHEDPEVKFNWYVDGVEVHNAKTKPCEEQYGSTYRCVSVLTVLHQDWLNGKEYKCKVSNKALPAPIEKTISKAKGQPREPQVYTLPPSREEMTKNQVSLTCLVKGFYPSDIAVEWESNGQPENNYKTTPPVLDSDGSFFLYSKLTVDKSRWQQGNVFSCSVMHEALHNHYTQKSLSLSPGK

SEQ ID NO: 809 - protein, 994 aa, Artificial Sequence
  Synthetic
EIVLTQSPGTLSLSPGERATLSCRASQSVSSSYLAWYQQKPGQAPRLLIYGASSRATGIPDRFSGSGSGTDFTLTISRLEPEDFAVYYCQQYGSSPLTFGCGTKLEIKGGGGSGGGGSGGGGSQVQLVQSGAEVKKPGASVKVSCKASGYTFTGYYMHWVRQAPGQCLEWMGWINPNSGETNYAQKFQGRVTMTRDTSISTAYMELSRLRSDDTAVYYCARDALIVVAPVTRDYYYYGMDVWGQGTTVTVSSGGGGSEVQLVESGGGLVQPGGSLKLSCAASGFTFNKYAMNWVRQAPGKGLEWVARIRSKYNNYATYYADSVKDRFTISRDDSKNTAYLQMNNLKTEDTAVYYCVRHGNFGNSYISYWAYWGQGTLVTVSSGGGGSGGGGSGGGGSQTVVTQEPSLTVSPGGTVTLTCGSSTGAVTSGNYPNWVQQKPGQAPRGLIGGTKFLAPGTPARFSGSLLGGKAALTLSGVQPEDEAEYYCVLWYSNRWVFGGGTKLTVLGGGGDKTHTCPPCPAPELLGGPSVFLFPPKPKDTLMISRTPEVTCVVVDVSHEDPEVKFNWYVDGVEVHNAKTKPCEEQYGSTYRCVSVLTVLHQDWLNGKEYKCKVSNKALPAPIEKTISKAKGQPREPQVYTLPPSREEMTKNQVSLTCLVKGFYPSDIAVEWESNGQPENNYKTTPPVLDSDGSFFLYSKLTVDKSRWQQGNVFSCSVMHEALHNHYTQKSLSLSPGKGGGGSGGGGSGGGGSGGGGSGGGGSGGGGSDKTHTCPPCPAPELLGGPSVFLFPPKPKDTLMISRTPEVTCVVVDVSHEDPEVKFNWYVDGVEVHNAKTKPCEEQYGSTYRCVSVLTVLHQDWLNGKEYKCKVSNKALPAPIEKTISKAKGQPREPQVYTLPPSREEMTKNQVSLTCLVKGFYPSDIAVEWESNGQPENNYKTTPPVLDSDGSFFLYSKLTVDKSRWQQGNVFSCSVMHEALHNHYTQKSLSLSPGK

SEQ ID NO: 810 - protein, 984 aa, Artificial Sequence
  Synthetic
EIVLTQSPGTLSLSPGERATLSCRASQSVSSSYLAWYQQKPGQAPRLLIYGASSRATGIPDRFSGSGSGTDFTLTISRLEPEDFAVYYCQQYGSSPLTFGCGTKLEIKGGGGQGGGGQGGGGQQVQLVQSGAEVKKPGASVKVSCKASGYTFTGYYMHWVRQAPGQCLEWMGWINPNSGETNYAQKFQGRVTMTRDTSISTAYMELSRLRSDDTAVYYCARDALIVVAPVTRDYYYYGMDVWGQGTTVTVSSGGGGQEVQLVESGGGLVQPGGSLKLSCAASGFTFNKYAMNWVRQAPGKGLEWVARIRSKYNNYATYYADSVKDRFTISRDDSKNTAYLQMNNLKTEDTAVYYCVRHGNFGNSYISYWAYWGQGTLVTVSSGGGGQGGGGQGGGGQQTVVTQEPSLTVSPGGTVTLTCGSSTGAVTSGNYPNWVQQKPGQAPRGLIGGTKFLAPGTPARFSGSLLGGKAALTLSGVQPEDEAEYYCVLWYSNRWVFGGGTKLTVLGGGGCPPCPAPELLGGPSVFLFPPKPKDTLMISRTPEVTCVVVDVSHEEPEVKFNWYVDGVEVHNAKTKPCEEQYGSTYRCVSVLTVLHQDWLNGKEYKCKVSNKALPAPIEKTISKAKGQPREPQVYTLPPSREEMTKNQVSLTCLVKGFYPSDIAVEWESNGQPENNYKTTPPVLDSDGSFFLYSKLTVDKSRWQQGNVFSCSVMHEALHNHYTQKSLSLSPGKGGGGQGGGGQGGGGQGGGGQGGGGQGGGGQCPPCPAPELLGGPSVFLFPPKPKDTLMISRTPEVTCVVVDVSHEEPEVKFNWYVDGVEVHNAKTKPCEEQYGSTYRCVSVLTVLHQDWLNGKEYKCKVSNKALPAPIEKTISKAKGQPREPQVYTLPPSREEMTKNQVSLTCLVKGFYPSDIAVEWESNGQPENNYKTTPPVLDSDGSFFLYSKLTVDKSRWQQGNVFSCSVMHEALHNHYTQKSLSLSPGK

SEQ ID NO: 811 - protein, 990 aa, Artificial Sequence
  Synthetic
QVQLVQSGAEVKKPGASVKVSCKASGYTFTGYYMHWVRQAPGQCLEWMGWINPNSGGTKYAQKFQGRVTMTRDTSISTAYMELSRLRSDDTAVYYCARDRITVAGTYYYYGMDVWGQGTTVTVSSGGGGSGGGGSGGGGSDIQMTQSPSSVSASVGDRVTITCRASQGVNNWLAWYQQKPGKAPKLLIYTASSLQSGVPSRFSGSGSGTDFTLTIRSLQPEDFATYYCQQANSFPITFGCGTRLEIKSGGGGSEVQLVESGGGLVQPGGSLKLSCAASGFTFNKYAMNWVRQAPGKGLEWVARIRSKYNNYATYYADSVKDRFTISRDDSKNTAYLQMNNLKTEDTAVYYCVRHGNFGNSYISYWAYWGQGTLVTVSSGGGGSGGGGSGGGGSQTVVTQEPSLTVSPGGTVTLTCGSSTGAVTSGNYPNWVQQKPGQAPRGLIGGTKFLAPGTPARFSGSLLGGKAALTLSGVQPEDEAEYYCVLWYSNRWVFGGGTKLTVLGGGGDKTHTCPPCPAPELLGGPSVFLFPPKPKDTLMISRTPEVTCVVVDVSHEDPEVKFNWYVDGVEVHNAKTKPCEEQYGSTYRCVSVLTVLHQDWLNGKEYKCKVSNKALPAPIEKTISKAKGQPREPQVYTLPPSREEMTKNQVSLTCLVKGFYPSDIAVEWESNGQPENNYKTTPPVLDSDGSFFLYSKLTVDKSRWQQGNVFSCSVMHEALHNHYTQKSLSLSPGKGGGGSGGGGSGGGGSGGGGSGGGGSGGGGSDKTHTCPPCPAPELLGGPSVFLFPPKPKDTLMISRTPEVTCVVVDVSHEDPEVKFNWYVDGVEVHNAKTKPCEEQYGSTYRCVSVLTVLHQDWLNGKEYKCKVSNKALPAPIEKTISKAKGQPREPQVYTLPPSREEMTKNQVSLTCLVKGFYPSDIAVEWESNGQPENNYKTTPPVLDSDGSFFLYSKLTVDKSRWQQGNVFSCSVMHEALHNHYTQKSLSLSPGK

SEQ ID NO: 812 - protein, 980 aa, Artificial Sequence
  Synthetic
QVQLVQSGAEVKKPGASVKVSCKASGYTFTGYYMHWVRQAPGQCLEWMGWINPNSGGTKYAQKFQGRVTMTRDTSISTAYMELSRLRSDDTAVYYCARDRITVAGTYYYYGMDVWGQGTTVTVSSGGGGQGGGGQGGGGQEIQMTQSPSSVSASVGDRVTITCRASQGVNNWLAWYQQKPGKAPKLLIYTASSLQSGVPSRFSGSGSGTDFTLTIRSLQPEDFATYYCQQANSFPITFGCGTRLEIKSGGGGQEVQLVESGGGLVQPGGSLKLSCAASGFTFNKYAMNWVRQAPGKGLEWVARIRSKYNNYATYYADSVKDRFTISRDDSKNTAYLQMNNLKTEDTAVYYCVRHGNFGNSYISYWAYWGQGTLVTVSSGGGGQGGGGQGGGGQQTVVTQEPSLTVSPGGTVTLTCGSSTGAVTSGNYPNWVQQKPGQAPRGLIGGTKFLAPGTPARFSGSLLGGKAALTLSGVQPEDEAEYYCVLWYSNRWVFGGGTKLTVLGGGGCPPCPAPELLGGPSVFLFPPKPKDTLMISRTPEVTCVVVDVSHEEPEVKFNWYVDGVEVHNAKTKPCEEQYGSTYRCVSVLTVLHQDWLNGKEYKCKVSNKALPAPIEKTISKAKGQPREPQVYTLPPSREEMTKNQVSLTCLVKGFYPSDIAVEWESNGQPENNYKTTPPVLDSDGSFFLYSKLTVDKSRWQQGNVFSCSVMHEALHNHYTQKSLSLSPGKGGGGQGGGGQGGGGQGGGGQGGGGQGGGGQCPPCPAPELLGGPSVFLFPPKPKDTLMISRTPEVTCVVVDVSHEEPEVKFNWYVDGVEVHNAKTKPCEEQYGSTYRCVSVLTVLHQDWLNGKEYKCKVSNKALPAPIEKTISKAKGQPREPQVYTLPPSREEMTKNQVSLTCLVKGFYPSDIAVEWESNGQPENNYKTTPPVLDSDGSFFLYSKLTVDKSRWQQGNVFSCSVMHEALHNHYTQKSLSLSPGK

SEQ ID NO: 813 - protein, 982 aa, Artificial Sequence
  Synthetic
QVQLQESGPGLVKPSETLSLTCTVSGGSISSYYWSWIRQPPGKCLEWIGYVYYSGTTNYNPSLKSRVTISVDTSKNQFSLKLSSVTAADTAVYYCASIAVTGFYFDYWGQGTLVTVSSGGGGSGGGGSGGGGSEIVLTQSPGTLSLSPGERVTLSCRASQRVNNNYLAWYQQRPGQAPRLLIYGASSRATGIPDRFSGSGSGTDFTLTISRLEPEDFAVYYCQQYDRSPLTFGCGTKLEIKSGGGGSEVQLVESGGGLVQPGGSLKLSCAASGFTFNKYAMNWVRQAPGKGLEWVARIRSKYNNYATYYADSVKDRFTISRDDSKNTAYLQMNNLKTEDTAVYYCVRHGNFGNSYISYWAYWGQGTLVTVSSGGGGSGGGGSGGGGSQTVVTQEPSLTVSPGGTVTLTCGSSTGAVTSGNYPNWVQQKPGQAPRGLIGGTKFLAPGTPARFSGSLLGGKAALTLSGVQPEDEAEYYCVLWYSNRWVFGGGTKLTVLGGGGDKTHTCPPCPAPELLGGPSVFLFPPKPKDTLMISRTPEVTCVVVDVSHEDPEVKFNWYVDGVEVHNAKTKPCEEQYGSTYRCVSVLTVLHQDWLNGKEYKCKVSNKALPAPIEKTISKAKGQPREPQVYTLPPSREEMTKNQVSLTCLVKGFYPSDIAVEWESNGQPENNYKTTPPVLDSDGSFFLYSKLTVDKSRWQQGNVFSCSVMHEALHNHYTQKSLSLSPGGGGSGGGGSGGGGSGGGGSGGGGSGGGGSDKTHTCPPCPAPELLGGPSVFLFPPKPKDTLMISRTPEVTCVVVDVSHEDPEVKFNWYVDGVEVHNAKTKPCEEQYGSTYRCVSVLTVLHQDWLNGKEYKCKVSNKALPAPIEKTISKAKGQPREPQVYTLPPSREEMTKNQVSLTCLVKGFYPSDIAVEWESNGQPENNYKTTPPVLDSDGSFFLYSKLTVDKSRWQQGNVFSCSVMHEALHNHYTQKSLSLSPGK

SEQ ID NO: 814 - protein, 972 aa, Artificial Sequence
  Synthetic
QVQLQESGPGLVKPSETLSLTCTVSGGSISSYYWSWIRQPPGKCLEWIGYVYYSGTTNYNPSLKSRVTISVDTSKNQFSLKLSSVTAADTAVYYCASIAVTGFYFDYWGQGTLVTVSSGGGGQGGGGQGGGGQEIVLTQSPGTLSLSPGERVTLSCRASQRVNNNYLAWYQQRPGQAPRLLIYGASSRATGIPDRFSGSGSGTDFTLTISRLEPEDFAVYYCQQYDRSPLTFGCGTKLEIKSGGGGQEVQLVESGGGLVQPGGSLKLSCAASGFTFNKYAMNWVRQAPGKGLEWVARIRSKYNNYATYYADSVKDRFTISRDDSKNTAYLQMNNLKTEDTAVYYCVRHGNFGNSYISYWAYWGQGTLVTVSSGGGGQGGGGQGGGGQQTVVTQEPSLTVSPGGTVTLTCGSSTGAVTSGNYPNWVQQKPGQAPRGLIGGTKFLAPGTPARFSGSLLGGKAALTLSGVQPEDEAEYYCVLWYSNRWVFGGGTKLTVLGGGGCPPCPAPELLGGPSVFLFPPKPKDTLMISRTPEVTCVVVDVSHEEPEVKFNWYVDGVEVHNAKTKPCEEQYGSTYRCVSVLTVLHQDWLNGKEYKCKVSNKALPAPIEKTISKAKGQPREPQVYTLPPSREEMTKNQVSLTCLVKGFYPSDIAVEWESNGQPENNYKTTPPVLDSDGSFFLYSKLTVDKSRWQQGNVFSCSVMHEALHNHYTQKSLSLSPGGGGQGGGGQGGGGQGGGGQGGGGQGGGGQCPPCPAPELLGGPSVFLFPPKPKDTLMISRTPEVTCVVVDVSHEEPEVKFNWYVDGVEVHNAKTKPCEEQYGSTYRCVSVLTVLHQDWLNGKEYKCKVSNKALPAPIEKTISKAKGQPREPQVYTLPPSREEMTKNQVSLTCLVKGFYPSDIAVEWESNGQPENNYKTTPPVLDSDGSFFLYSKLTVDKSRWQQGNVFSCSVMHEALHNHYTQKSLSLSPGK

SEQ ID NO: 815 - protein, 986 aa, Artificial Sequence
  Synthetic
QVQLVESGGGLVKPGESLRLSCAASGFTFSDYYMYWVRQAPGKCLEWVAIISDGGYYTYYSDIIKGRFTISRDNAKNSLYLQMNSLKAEDTAVYYCARGFPLLRHGAMDYWGQGTLVTVSSGGGGQGGGGQGGGGQDIQMTQSPSSLSASVGDRVTITCKASQNVDTNVAWYQQKPGQAPKSLIYSASYVYWDVPSRFSGSASGTDFTLTISSVQSEDFATYYCQQYDQQLITFGCGTKLEIKSGGGGQEVQLVESGGGLVQPGGSLKLSCAASGFTFNKYAINWVRQAPGKGLEWVARIRSKYNNYATYYADAVKDRFTISRDDSKNTVYLQMNNLKTEDTAVYYCARAGNFGSSYISYWAYCGQGTLVTVSSGGGGQGGGGQGGGGQQTVVTQEPSLTVSPGGTVTITCGSSTGAVTSGNYPNWVQKKPGQCPRGLIGGTKFLAPGTPARFSGSLSGGKAALTLSGVQPEDEAEYYCVLWYSNRWVFGSGTKLTVLGGGGDKTHTCPPCPAPELLGGPSVFLFPPKPKDTLMISRTPEVTCVVVDVSHEDPEVKFNWYVDGVEVHNAKTKPCEEQYGSTYRCVSVLTVLHQDWLNGKEYKCKVSNKALPAPIEKTISKAKGQPREPQVYTLPPSREEMTKNQVSLTCLVKGFYPSDIAVEWESNGQPENNYKTTPPVLDSDGSFFLYSKLTVDKSRWQQGNVFSCSVMHEALHNHYTQKSLSLSPGKGGGGQGGGGQGGGGQGGGGQGGGGQGGGGQDKTHTCPPCPAPELLGGPSVFLFPPKPKDTLMISRTPEVTCVVVDVSHEDPEVKFNWYVDGVEVHNAKTKPCEEQYGSTYRCVSVLTVLHQDWLNGKEYKCKVSNKALPAPIEKTISKAKGQPREPQVYTLPPSREEMTKNQVSLTCLVKGFYPSDIAVEWESNGQPENNYKTTPPVLDSDGSFFLYSKLTVDKSRWQQGNVFSCSVMHEALHNHYTQKSLSLSPGK

SEQ ID NO: 816 - protein, 986 aa, Artificial Sequence
  Synthetic
QVQLVESGGGLVKPGESLRLSCAASGFTFSDYYMYWVRQAPGKCLEWVAIISDGGYYTYYSDIIKGRFTISRDNAKNSLYLQMNSLKAEDTAVYYCARGFPLLRHGAMDYWGQGTLVTVSSGGGGQGGGGQGGGGQDIQMTQSPSSLSASVGDRVTITCKASQNVDTNVAWYQQKPGQAPKSLIYSASYVYWDVPSRFSGSASGTDFTLTISSVQSEDFATYYCQQYDQQLITFGCGTKLEIKSGGGGQEVQLVESGGGLVQPGGSLKLSCAASGFTFNKYAMNWVRQAPGKGLEWVARIRSKYNNYATYYADSVKDRFTISRDDSKNTAYLQMNNLKTEDTAVYYCVRHGNFGNSYISYWAYCGQGTLVTVSSGGGGQGGGGQGGGGQQTVVTQEPSLTVSPGGTVTLTCGSSTGAVTSGNYPNWVQQKPGQCPRGLIGGTKFLAPGTPARFSGSLLGGKAALTLSGVQPEDEAEYYCVLWYSNRWVFGGGTKLTVLGGGGDKTHTCPPCPAPELLGGPSVFLFPPKPKDTLMISRTPEVTCVVVDVSHEDPEVKFNWYVDGVEVHNAKTKPCEEQYGSTYRCVSVLTVLHQDWLNGKEYKCKVSNKALPAPIEKTISKAKGQPREPQVYTLPPSREEMTKNQVSLTCLVKGFYPSDIAVEWESNGQPENNYKTTPPVLDSDGSFFLYSKLTVDKSRWQQGNVFSCSVMHEALHNHYTQKSLSLSPGKGGGGQGGGGQGGGGQGGGGQGGGGQGGGGQDKTHTCPPCPAPELLGGPSVFLFPPKPKDTLMISRTPEVTCVVVDVSHEDPEVKFNWYVDGVEVHNAKTKPCEEQYGSTYRCVSVLTVLHQDWLNGKEYKCKVSNKALPAPIEKTISKAKGQPREPQVYTLPPSREEMTKNQVSLTCLVKGFYPSDIAVEWESNGQPENNYKTTPPVLDSDGSFFLYSKLTVDKSRWQQGNVFSCSVMHEALHNHYTQKSLSLSPGK

SEQ ID NO: 817 - protein, 989 aa, Artificial Sequence
  Synthetic
QVTLKESGPTLVKPTETLTLTCTLSGFSLNNARMGVSWIRQPPGKCLEWLAHIFSNDEKSYSTSLKNRLTISKDSSKTQVVLTMTNVDPVDTATYYCARIVGYGSGWYGFFDYWGQGTLVTVSSGGGGSGGGGSGGGGSDIQMTQSPSSLSASVGDRVTITCRASQGIRNDLGWYQQKPGKAPKRLIYAASTLQSGVPSRFSGSGSGTEFTLTISSLQPEDFATYYCLQHNSYPLTFGCGTKVEIKSGGGGSEVQLVESGGGLVQPGGSLKLSCAASGFTFNKYAMNWVRQAPGKGLEWVARIRSKYNNYATYYADSVKDRFTISRDDSKNTAYLQMNNLKTEDTAVYYCVRHGNFGNSYISYWAYWGQGTLVTVSSGGGGSGGGGSGGGGSQTVVTQEPSLTVSPGGTVTLTCGSSTGAVTSGNYPNWVQQKPGQAPRGLIGGTKFLAPGTPARFSGSLLGGKAALTLSGVQPEDEAEYYCVLWYSNRWVFGGGTKLTVLGGGGDKTHTCPPCPAPELLGGPSVFLFPPKPKDTLMISRTPEVTCVVVDVSHEDPEVKFNWYVDGVEVHNAKTKPCEEQYGSTYRCVSVLTVLHQDWLNGKEYKCKVSNKALPAPIEKTISKAKGQPREPQVYTLPPSREEMTKNQVSLTCLVKGFYPSDIAVEWESNGQPENNYKTTPPVLDSDGSFFLYSKLTVDKSRWQQGNVFSCSVMHEALHNHYTQKSLSLSPGKGGGGSGGGGSGGGGSGGGGSGGGGSGGGGSDKTHTCPPCPAPELLGGPSVFLFPPKPKDTLMISRTPEVTCVVVDVSHEDPEVKFNWYVDGVEVHNAKTKPCEEQYGSTYRCVSVLTVLHQDWLNGKEYKCKVSNKALPAPIEKTISKAKGQPREPQVYTLPPSREEMTKNQVSLTCLVKGFYPSDIAVEWESNGQPENNYKTTPPVLDSDGSFFLYSKLTVDKSRWQQGNVFSCSVMHEALHNHYTQKSLSLSPGK

SEQ ID NO: 818 - protein, 979 aa, Artificial Sequence
  Synthetic
QVTLKESGPTLVKPTETLTLTCTLSGFSLNNARMGVSWIRQPPGKCLEWLAHIFSNDEKSYSTSLKNRLTISKDSSKTQVVLTMTNVDPVDTATYYCARIVGYGSGWYGFFDYWGQGTLVTVSSGGGGQGGGGQGGGGQEIQMTQSPSSLSASVGDRVTITCRASQGIRNDLGWYQQKPGKAPKRLIYAASTLQSGVPSRFSGSGSGTEFTLTISSLQPEDFATYYCLQHNSYPLTFGCGTKVEIKSGGGGQEVQLVESGGGLVQPGGSLKLSCAASGFTFNKYAMNWVRQAPGKGLEWVARIRSKYNNYATYYADSVKDRFTISRDDSKNTAYLQMNNLKTEDTAVYYCVRHGNFGNSYISYWAYWGQGTLVTVSSGGGGQGGGGQGGGGQQTVVTQEPSLTVSPGGTVTLTCGSSTGAVTSGNYPNWVQQKPGQAPRGLIGGTKFLAPGTPARFSGSLLGGKAALTLSGVQPEDEAEYYCVLWYSNRWVFGGGTKLTVLGGGGCPPCPAPELLGGPSVFLFPPKPKDTLMISRTPEVTCVVVDVSHEEPEVKFNWYVDGVEVHNAKTKPCEEQYGSTYRCVSVLTVLHQDWLNGKEYKCKVSNKALPAPIEKTISKAKGQPREPQVYTLPPSREEMTKNQVSLTCLVKGFYPSDIAVEWESNGQPENNYKTTPPVLDSDGSFFLYSKLTVDKSRWQQGNVFSCSVMHEALHNHYTQKSLSLSPGKGGGGQGGGGQGGGGQGGGGQGGGGQGGGGQCPPCPAPELLGGPSVFLFPPKPKDTLMISRTPEVTCVVVDVSHEEPEVKFNWYVDGVEVHNAKTKPCEEQYGSTYRCVSVLTVLHQDWLNGKEYKCKVSNKALPAPIEKTISKAKGQPREPQVYTLPPSREEMTKNQVSLTCLVKGFYPSDIAVEWESNGQPENNYKTTPPVLDSDGSFFLYSKLTVDKSRWQQGNVFSCSVMHEALHNHYTQKSLSLSPGK

SEQ ID NO: 819 - protein, 983 aa, Artificial Sequence
  Synthetic
QVQLVQSGAEVKKPGESVKVSCKASGYTFTNYGMNWVKQAPGQCLEWMGWINTYTGEPTYADKFQGRVTMTTDTSTSTAYMEIRNLGGDDTAVYYCARWSWSDGYYVYFDYWGQGTSVTVSSGGGGSGGGGSGGGGSDIVMTQSPDSLTVSLGERTTINCKSSQSVLDSSTNKNSLAWYQQKPGQPPKLLLSWASTRESGIPDRFSGSGSGTDFTLTIDSPQPEDSATYYCQQSAHFPITFGCGTRLEIKSGGGGSEVQLVESGGGLVQPGGSLKLSCAASGFTFNKYAMNWVRQAPGKGLEWVARIRSKYNNYATYYADSVKDRFTISRDDSKNTAYLQMNNLKTEDTAVYYCVRHGNFGNSYISYWAYWGQGTLVTVSSGGGGSGGGGSGGGGSQTVVTQEPSLTVSPGGTVTLTCGSSTGAVTSGNYPNWVQQKPGQAPRGLIGGTKFLAPGTPARFSGSLLGGKAALTLSGVQPEDEAEYYCVLWYSNRWVFGGGTKLTVLGGGGCPPCPAPELLGGPSVFLFPPKPKDTLMISRTPEVTCVVVDVSHEEPEVKFNWYVDGVEVHNAKTKPCEEQYGSTYRCVSVLTVLHQDWLNGKEYKCKVSNKALPAPIEKTISKAKGQPREPQVYTLPPSREEMTKNQVSLTCLVKGFYPSDIAVEWESNGQPENNYKTTPPVLDSDGSFFLYSKLTVDKSRWQQGNVFSCSVMHEALHNHYTQKSLSLSPGKGGGGSGGGGSGGGGSGGGGSGGGGSGGGGSCPPCPAPELLGGPSVFLFPPKPKDTLMISRTPEVTCVVVDVSHEEPEVKFNWYVDGVEVHNAKTKPCEEQYGSTYRCVSVLTVLHQDWLNGKEYKCKVSNKALPAPIEKTISKAKGQPREPQVYTLPPSREEMTKNQVSLTCLVKGFYPSDIAVEWESNGQPENNYKTTPPVLDSDGSFFLYSKLTVDKSRWQQGNVFSCSVMHEALHNHYTQKSLSLSPGK

SEQ ID NO: 820 - protein, 986 aa, Artificial Sequence
  Synthetic
QVQLVESGGGLVKPGESLRLSCAASGFTFSDYYMYWVRQAPGKCLEWVAIISDGGYYTYYSDIIKGRFTISRDNAKNSLYLQMNSLKAEDTAVYYCARGFPLLRHGAMDYWGQGTLVTVSSGGGGQGGGGQGGGGQDIQMTQSPSSLSASVGDRVTITCKASQNVDTNVAWYQQKPGQAPKSLIYSASYVYWDVPSRFSGSASGTDFTLTISSVQSEDFATYYCQQYDQQLITFGCGTKLEIKSGGGGQEVQLVESGGGLVQPGGSLKLSCAASGFTFNKYAINWVRQAPGKGLEWVARIRSKYNNYATYYADAVKDRFTISRDDSKNTVYLQMNNLKTEDTAVYYCARAGNFGSSYISYWAYWGQGTLVTVSSGGGGQGGGGQGGGGQQTVVTQEPSLTVSPGGTVTITCGSSTGAVTSGNYPNWVQKKPGQAPRGLIGGTKFLAPGTPARFSGSLSGGKAALTLSGVQPEDEAEYYCVLWYSNRWVFGSGTKLTVLGGGGDKTHTCPPCPAPELLGGPSVFLFPPKPKDTLMISRTPEVTCVVVDVSHEDPEVKFNWYVDGVEVHNAKTKPCEEQYGSTYRCVSVLTVLHQDWLNGKEYKCKVSNKALPAPIEKTISKAKGQPREPQVYTLPPSREEMTKNQVSLTCLVKGFYPSDIAVEWESNGQPENNYKTTPPVLDSDGSFFLYSKLTVDKSRWQQGNVFSCSVMHEALHNHYTQKSLSLSPGKGGGGQGGGGQGGGGQGGGGQGGGGQGGGGQDKTHTCPPCPAPELLGGPSVFLFPPKPKDTLMISRTPEVTCVVVDVSHEDPEVKFNWYVDGVEVHNAKTKPCEEQYGSTYRCVSVLTVLHQDWLNGKEYKCKVSNKALPAPIEKTISKAKGQPREPQVYTLPPSREEMTKNQVSLTCLVKGFYPSDIAVEWESNGQPENNYKTTPPVLDSDGSFFLYSKLTVDKSRWQQGNVFSCSVMHEALHNHYTQKSLSLSPGK

SEQ ID NO: 821 - protein, 976 aa, Artificial Sequence
  Synthetic
QVQLVESGGGLVKPGESLRLSCAASGFTFSDYYMYWVRQAPGKCLEWVAIISDGGYYTYYSDIIKGRFTISRDNAKNSLYLQMNSLKAEDTAVYYCARGFPLLRHGAMDYWGQGTLVTVSSGGGGQGGGGQGGGGQDIQMTQSPSSLSASVGDRVTITCKASQNVDTNVAWYQQKPGQAPKSLIYSASYVYWDVPSRFSGSASGTDFTLTISSVQSEDFATYYCQQYDQQLITFGCGTKLEIKSGGGGQEVQLVESGGGLVQPGGSLKLSCAASGFTFNKYAMNWVRQAPGKGLEWVARIRSKYNNYATYYADSVKDRFTISRDDSKNTAYLQMNNLKTEDTAVYYCVRHGNFGNSYISYWAYCGQGTLVTVSSGGGGQGGGGQGGGGQQTVVTQEPSLTVSPGGTVTLTCGSSTGAVTSGNYPNWVQQKPGQCPRGLIGGTKFLAPGTPARFSGSLLGGKAALTLSGVQPEDEAEYYCVLWYSNRWVFGGGTKLTVLGGGGCPPCPAPELLGGPSVFLFPPKPKDTLMISRTPEVTCVVVDVSHEEPEVKFNWYVDGVEVHNAKTKPCEEQYGSTYRCVSVLTVLHQDWLNGKEYKCKVSNKALPAPIEKTISKAKGQPREPQVYTLPPSREEMTKNQVSLTCLVKGFYPSDIAVEWESNGQPENNYKTTPPVLDSDGSFFLYSKLTVDKSRWQQGNVFSCSVMHEALHNHYTQKSLSLSPGKGGGGQGGGGQGGGGQGGGGQGGGGQGGGGQCPPCPAPELLGGPSVFLFPPKPKDTLMISRTPEVTCVVVDVSHEEPEVKFNWYVDGVEVHNAKTKPCEEQYGSTYRCVSVLTVLHQDWLNGKEYKCKVSNKALPAPIEKTISKAKGQPREPQVYTLPPSREEMTKNQVSLTCLVKGFYPSDIAVEWESNGQPENNYKTTPPVLDSDGSFFLYSKLTVDKSRWQQGNVFSCSVMHEALHNHYTQKSLSLSPGK

SEQ ID NO: 822 - protein, 992 aa, Artificial Sequence
  Synthetic
EVQLVESGGGLVQPGGSLRLSCAASGFTFSNAWMSWVRQAPGKCLEWVGRIRSRSYGGTTDYAAPVKGRFTISRDDSKNTLFLQMNSLKTEDTAVYYCTTPSYSGSYYNYFSVMDVWGQGTTVTVSSGGGGSGGGGSGGGGSDIQMTQSPSSLSASVGDRVTITCRTSQSISSYLNWYQQKPGRAPKLLIFAASSLQGGVPSRFSGSGSGTDFTLTISSLQPEDFATYYCQQTYSMPFTFGCGTKVEIKSGGGGSEVQLVESGGGLVQPGGSLKLSCAASGFTFNKYAMNWVRQAPGKGLEWVARIRSKYNNYATYYADSVKDRFTISRDDSKNTAYLQMNNLKTEDTAVYYCVRHGNFGNSYISYWAYWGQGTLVTVSSGGGGSGGGGSGGGGSQTVVTQEPSLTVSPGGTVTLTCGSSTGAVTSGNYPNWVQQKPGQAPRGLIGGTKFLAPGTPARFSGSLLGGKAALTLSGVQPEDEAEYYCVLWYSNRWVFGGGTKLTVLGGGGDKTHTCPPCPAPELLGGPSVFLFPPKPKDTLMISRTPEVTCVVVDVSHEDPEVKFNWYVDGVEVHNAKTKPCEEQYGSTYRCVSVLTVLHQDWLNGKEYKCKVSNKALPAPIEKTISKAKGQPREPQVYTLPPSREEMTKNQVSLTCLVKGFYPSDIAVEWESNGQPENNYKTTPPVLDSDGSFFLYSKLTVDKSRWQQGNVFSCSVMHEALHNHYTQKSLSLSPGKGGGGSGGGGSGGGGSGGGGSGGGGSGGGGSDKTHTCPPCPAPELLGGPSVFLFPPKPKDTLMISRTPEVTCVVVDVSHEDPEVKFNWYVDGVEVHNAKTKPCEEQYGSTYRCVSVLTVLHQDWLNGKEYKCKVSNKALPAPIEKTISKAKGQPREPQVYTLPPSREEMTKNQVSLTCLVKGFYPSDIAVEWESNGQPENNYKTTPPVLDSDGSFFLYSKLTVDKSRWQQGNVFSCSVMHEALHNHYTQKSLSLSPGK

SEQ ID NO: 823 - protein, 982 aa, Artificial Sequence
  Synthetic
EVQLVESGGGLVQPGGSLRLSCAASGFTFSNAWMSWVRQAPGKCLEWVGRIRSRSYGGTTDYAAPVKGRFTISRDDSKNTLFLQMNSLKTEDTAVYYCTTPSYSGSYYNYFSVMDVWGQGTTVTVSSGGGGQGGGGQGGGGQEIQMTQSPSSLSASVGDRVTITCRTSQSISSYLNWYQQKPGRAPKLLIFAASSLQGGVPSRFSGSGSGTDFTLTISSLQPEDFATYYCQQTYSMPFTFGCGTKVEIKSGGGGQEVQLVESGGGLVQPGGSLKLSCAASGFTFNKYAMNWVRQAPGKGLEWVARIRSKYNNYATYYADSVKDRFTISRDDSKNTAYLQMNNLKTEDTAVYYCVRHGNFGNSYISYWAYWGQGTLVTVSSGGGGQGGGGQGGGGQQTVVTQEPSLTVSPGGTVTLTCGSSTGAVTSGNYPNWVQQKPGQAPRGLIGGTKFLAPGTPARFSGSLLGGKAALTLSGVQPEDEAEYYCVLWYSNRWVFGGGTKLTVLGGGGCPPCPAPELLGGPSVFLFPPKPKDTLMISRTPEVTCVVVDVSHEEPEVKFNWYVDGVEVHNAKTKPCEEQYGSTYRCVSVLTVLHQDWLNGKEYKCKVSNKALPAPIEKTISKAKGQPREPQVYTLPPSREEMTKNQVSLTCLVKGFYPSDIAVEWESNGQPENNYKTTPPVLDSDGSFFLYSKLTVDKSRWQQGNVFSCSVMHEALHNHYTQKSLSLSPGKGGGGQGGGGQGGGGQGGGGQGGGGQGGGGQCPPCPAPELLGGPSVFLFPPKPKDTLMISRTPEVTCVVVDVSHEEPEVKFNWYVDGVEVHNAKTKPCEEQYGSTYRCVSVLTVLHQDWLNGKEYKCKVSNKALPAPIEKTISKAKGQPREPQVYTLPPSREEMTKNQVSLTCLVKGFYPSDIAVEWESNGQPENNYKTTPPVLDSDGSFFLYSKLTVDKSRWQQGNVFSCSVMHEALHNHYTQKSLSLSPGK

SEQ ID NO: 824 - protein, 985 aa, Artificial Sequence
  Synthetic
EVQLLESGGGLVQPGGSLRLSCAASGFTFSSYAMSWVRQAPGKCLEWVSAISGSGGGTYYAASVKGRFTISRDNSKNTLYLQMSSLRAEDTAVYYCATGKGVHLGFDYWGQGTLVTVSSGGGGSGGGGSGGGGSSYVLTQPPSVSVAPGQTARITCGGNNIGSKSVHWYQQKPGQAPVMVVYDDNDRPSGIPERFSGSNSGNTATLTISRVEAGDEADYYCQVWDYSGQRQVFGCGTKLTVLSGGGGSEVQLVESGGGLVQPGGSLKLSCAASGFTFNKYAMNWVRQAPGKGLEWVARIRSKYNNYATYYADSVKDRFTISRDDSKNTAYLQMNNLKTEDTAVYYCVRHGNFGNSYISYWAYWGQGTLVTVSSGGGGSGGGGSGGGGSQTVVTQEPSLTVSPGGTVTLTCGSSTGAVTSGNYPNWVQQKPGQAPRGLIGGTKFLAPGTPARFSGSLLGGKAALTLSGVQPEDEAEYYCVLWYSNRWVFGGGTKLTVLGGGGDKTHTCPPCPAPELLGGPSVFLFPPKPKDTLMISRTPEVTCVVVDVSHEDPEVKFNWYVDGVEVHNAKTKPCEEQYGSTYRCVSVLTVLHQDWLNGKEYKCKVSNKALPAPIEKTISKAKGQPREPQVYTLPPSREEMTKNQVSLTCLVKGFYPSDIAVEWESNGQPENNYKTTPPVLDSDGSFFLYSKLTVDKSRWQQGNVFSCSVMHEALHNHYTQKSLSLSPGKGGGGSGGGGSGGGGSGGGGSGGGGSGGGGSDKTHTCPPCPAPELLGGPSVFLFPPKPKDTLMISRTPEVTCVVVDVSHEDPEVKFNWYVDGVEVHNAKTKPCEEQYGSTYRCVSVLTVLHQDWLNGKEYKCKVSNKALPAPIEKTISKAKGQPREPQVYTLPPSREEMTKNQVSLTCLVKGFYPSDIAVEWESNGQPENNYKTTPPVLDSDGSFFLYSKLTVDKSRWQQGNVFSCSVMHEALHNHYTQKSLSLSPGK

SEQ ID NO: 825 - protein, 975 aa, Artificial Sequence
  Synthetic
EVQLLESGGGLVQPGGSLRLSCAASGFTFSSYAMSWVRQAPGKCLEWVSAISGSGGGTYYAASVKGRFTISRDNSKNTLYLQMSSLRAEDTAVYYCATGKGVHLGFDYWGQGTLVTVSSGGGGQGGGGQGGGGQSYVLTQPPSVSVAPGQTARITCGGNNIGSKSVHWYQQKPGQAPVMVVYDDNDRPSGIPERFSGSNSGNTATLTISRVEAGDEADYYCQVWDYSGQRQVFGCGTKLTVLSGGGGQEVQLVESGGGLVQPGGSLKLSCAASGFTFNKYAMNWVRQAPGKGLEWVARIRSKYNNYATYYADSVKDRFTISRDDSKNTAYLQMNNLKTEDTAVYYCVRHGNFGNSYISYWAYWGQGTLVTVSSGGGGQGGGGQGGGGQQTVVTQEPSLTVSPGGTVTLTCGSSTGAVTSGNYPNWVQQKPGQAPRGLIGGTKFLAPGTPARFSGSLLGGKAALTLSGVQPEDEAEYYCVLWYSNRWVFGGGTKLTVLGGGGCPPCPAPELLGGPSVFLFPPKPKDTLMISRTPEVTCVVVDVSHEEPEVKFNWYVDGVEVHNAKTKPCEEQYGSTYRCVSVLTVLHQDWLNGKEYKCKVSNKALPAPIEKTISKAKGQPREPQVYTLPPSREEMTKNQVSLTCLVKGFYPSDIAVEWESNGQPENNYKTTPPVLDSDGSFFLYSKLTVDKSRWQQGNVFSCSVMHEALHNHYTQKSLSLSPGKGGGGQGGGGQGGGGQGGGGQGGGGQGGGGQCPPCPAPELLGGPSVFLFPPKPKDTLMISRTPEVTCVVVDVSHEEPEVKFNWYVDGVEVHNAKTKPCEEQYGSTYRCVSVLTVLHQDWLNGKEYKCKVSNKALPAPIEKTISKAKGQPREPQVYTLPPSREEMTKNQVSLTCLVKGFYPSDIAVEWESNGQPENNYKTTPPVLDSDGSFFLYSKLTVDKSRWQQGNVFSCSVMHEALHNHYTQKSLSLSPGK

SEQ ID NO: 826 - protein, 982 aa, Artificial Sequence
  Synthetic
QVQLVESGGGLVKPGGSLRLSCAASGFTFSDYYMTWIRQAPGKGLEWLSYISSSGSTIYYADSVKGRFTISRDNAKNSLFLQMNSLRAEDTAVYYCARDRNSHFDYWGQGTLVTVSSGGGGSGGGGSGGGGSDIQMTQSPSSVSASVGDRVTITCRASQGINTWLAWYQQKPGKAPKLLIYGASGLQSGVPSRFSGSGSGTDFTLTISSLQPEDFATYYCQQAKSFPRTFGQGTKVEIKSGGGGSEVQLVESGGGLVQPGGSLKLSCAASGFTFNKYAMNWVRQAPGKGLEWVARIRSKYNNYATYYADSVKDRFTISRDDSKNTAYLQMNNLKTEDTAVYYCVRHGNFGNSYISYWAYWGQGTLVTVSSGGGGSGGGGSGGGGSQTVVTQEPSLTVSPGGTVTLTCGSSTGAVTSGNYPNWVQQKPGQAPRGLIGGTKFLAPGTPARFSGSLLGGKAALTLSGVQPEDEAEYYCVLWYSNRWVFGGGTKLTVLGGGGDKTHTCPPCPAPELLGGPSVFLFPPKPKDTLMISRTPEVTCVVVDVSHEDPEVKFNWYVDGVEVHNAKTKPCEEQYGSTYRCVSVLTVLHQDWLNGKEYKCKVSNKALPAPIEKTISKAKGQPREPQVYTLPPSREEMTKNQVSLTCLVKGFYPSDIAVEWESNGQPENNYKTTPPVLDSDGSFFLYSKLTVDKSRWQQGNVFSCSVMHEALHNHYTQKSLSLSPGKGGGGSGGGGSGGGGSGGGGSGGGGSGGGGSDKTHTCPPCPAPELLGGPSVFLFPPKPKDTLMISRTPEVTCVVVDVSHEDPEVKFNWYVDGVEVHNAKTKPCEEQYGSTYRCVSVLTVLHQDWLNGKEYKCKVSNKALPAPIEKTISKAKGQPREPQVYTLPPSREEMTKNQVSLTCLVKGFYPSDIAVEWESNGQPENNYKTTPPVLDSDGSFFLYSKLTVDKSRWQQGNVFSCSVMHEALHNHYTQKSLSLSPGK

SEQ ID NO: 827 - protein, 972 aa, Artificial Sequence
  Synthetic
QVQLVESGGGLVKPGGSLRLSCAASGFTFSDYYMTWIRQAPGKGLEWLSYISSSGSTIYYADSVKGRFTISRDNAKNSLFLQMNSLRAEDTAVYYCARDRNSHFDYWGQGTLVTVSSGGGGQGGGGQGGGGQEIQMTQSPSSVSASVGDRVTITCRASQGINTWLAWYQQKPGKAPKLLIYGASGLQSGVPSRFSGSGSGTDFTLTISSLQPEDFATYYCQQAKSFPRTFGQGTKVEIKSGGGGQEVQLVESGGGLVQPGGSLKLSCAASGFTFNKYAMNWVRQAPGKGLEWVARIRSKYNNYATYYADSVKDRFTISRDDSKNTAYLQMNNLKTEDTAVYYCVRHGNFGNSYISYWAYWGQGTLVTVSSGGGGQGGGGQGGGGQQTVVTQEPSLTVSPGGTVTLTCGSSTGAVTSGNYPNWVQQKPGQAPRGLIGGTKFLAPGTPARFSGSLLGGKAALTLSGVQPEDEAEYYCVLWYSNRWVFGGGTKLTVLGGGGCPPCPAPELLGGPSVFLFPPKPKDTLMISRTPEVTCVVVDVSHEEPEVKFNWYVDGVEVHNAKTKPCEEQYGSTYRCVSVLTVLHQDWLNGKEYKCKVSNKALPAPIEKTISKAKGQPREPQVYTLPPSREEMTKNQVSLTCLVKGFYPSDIAVEWESNGQPENNYKTTPPVLDSDGSFFLYSKLTVDKSRWQQGNVFSCSVMHEALHNHYTQKSLSLSPGKGGGGQGGGGQGGGGQGGGGQGGGGQGGGGQCPPCPAPELLGGPSVFLFPPKPKDTLMISRTPEVTCVVVDVSHEEPEVKFNWYVDGVEVHNAKTKPCEEQYGSTYRCVSVLTVLHQDWLNGKEYKCKVSNKALPAPIEKTISKAKGQPREPQVYTLPPSREEMTKNQVSLTCLVKGFYPSDIAVEWESNGQPENNYKTTPPVLDSDGSFFLYSKLTVDKSRWQQGNVFSCSVMHEALHNHYTQKSLSLSPGK

SEQ ID NO: 828 - protein, 984 aa, Artificial Sequence
  Synthetic
QVQLQQWGAGLLKPSETLSLTCAVYGGSFSGYYWSWIRQPPGKCLEWIGDIDASGSTKYNPSLKSRVTISLDTSKNQFSLKLNSVTAADTAVYFCARKKYSTVWSYFDNWGQGTLVTVSSGGGGSGGGGSGGGGSSYELTQPSSVSVPPGQTASITCSGDKLGDKYASWYQQKPGQSPVLVIYQDRKRPSGVPERFSGSNSGNTATLTISGTQAMDEADYYCQAWGSSTAVFGCGTKLTVLSGGGGSEVQLVESGGGLVQPGGSLKLSCAASGFTFNKYAMNWVRQAPGKGLEWVARIRSKYNNYATYYADSVKDRFTISRDDSKNTAYLQMNNLKTEDTAVYYCVRHGNFGNSYISYWAYWGQGTLVTVSSGGGGSGGGGSGGGGSQTVVTQEPSLTVSPGGTVTLTCGSSTGAVTSGNYPNWVQQKPGQAPRGLIGGTKFLAPGTPARFSGSLLGGKAALTLSGVQPEDEAEYYCVLWYSNRWVFGGGTKLTVLGGGGDKTHTCPPCPAPELLGGPSVFLFPPKPKDTLMISRTPEVTCVVVDVSHEDPEVKFNWYVDGVEVHNAKTKPCEEQYGSTYRCVSVLTVLHQDWLNGKEYKCKVSNKALPAPIEKTISKAKGQPREPQVYTLPPSREEMTKNQVSLTCLVKGFYPSDIAVEWESNGQPENNYKTTPPVLDSDGSFFLYSKLTVDKSRWQQGNVFSCSVMHEALHNHYTQKSLSLSPGKGGGGSGGGGSGGGGSGGGGSGGGGSGGGGSDKTHTCPPCPAPELLGGPSVFLFPPKPKDTLMISRTPEVTCVVVDVSHEDPEVKFNWYVDGVEVHNAKTKPCEEQYGSTYRCVSVLTVLHQDWLNGKEYKCKVSNKALPAPIEKTISKAKGQPREPQVYTLPPSREEMTKNQVSLTCLVKGFYPSDIAVEWESNGQPENNYKTTPPVLDSDGSFFLYSKLTVDKSRWQQGNVFSCSVMHEALHNHYTQKSLSLSPGK

SEQ ID NO: 829 - protein, 974 aa, Artificial Sequence
  Synthetic
QVQLQQWGAGLLKPSETLSLTCAVYGGSFSGYYWSWIRQPPGKCLEWIGDIDASGSTKYNPSLKSRVTISLDTSKNQFSLKLNSVTAADTAVYFCARKKYSTVWSYFDNWGQGTLVTVSSGGGGQGGGGQGGGGQSYELTQPSSVSVPPGQTASITCSGDKLGDKYASWYQQKPGQSPVLVIYQDRKRPSGVPERFSGSNSGNTATLTISGTQAMDEADYYCQAWGSSTAVFGCGTKLTVLSGGGGQEVQLVESGGGLVQPGGSLKLSCAASGFTFNKYAMNWVRQAPGKGLEWVARIRSKYNNYATYYADSVKDRFTISRDDSKNTAYLQMNNLKTEDTAVYYCVRHGNFGNSYISYWAYWGQGTLVTVSSGGGGQGGGGQGGGGQQTVVTQEPSLTVSPGGTVTLTCGSSTGAVTSGNYPNWVQQKPGQAPRGLIGGTKFLAPGTPARFSGSLLGGKAALTLSGVQPEDEAEYYCVLWYSNRWVFGGGTKLTVLGGGGCPPCPAPELLGGPSVFLFPPKPKDTLMISRTPEVTCVVVDVSHEEPEVKFNWYVDGVEVHNAKTKPCEEQYGSTYRCVSVLTVLHQDWLNGKEYKCKVSNKALPAPIEKTISKAKGQPREPQVYTLPPSREEMTKNQVSLTCLVKGFYPSDIAVEWESNGQPENNYKTTPPVLDSDGSFFLYSKLTVDKSRWQQGNVFSCSVMHEALHNHYTQKSLSLSPGKGGGGQGGGGQGGGGQGGGGQGGGGQGGGGQCPPCPAPELLGGPSVFLFPPKPKDTLMISRTPEVTCVVVDVSHEEPEVKFNWYVDGVEVHNAKTKPCEEQYGSTYRCVSVLTVLHQDWLNGKEYKCKVSNKALPAPIEKTISKAKGQPREPQVYTLPPSREEMTKNQVSLTCLVKGFYPSDIAVEWESNGQPENNYKTTPPVLDSDGSFFLYSKLTVDKSRWQQGNVFSCSVMHEALHNHYTQKSLSLSPGK

SEQ ID NO: 830 - protein, 986 aa, Artificial Sequence
  Synthetic
QVQLVESGGGLVKPGESLRLSCAASGFTFSDYYMYWVRQAPGKCLEWVAIISDGGYYTYYSDIIKGRFTISRDNAKNSLYLQMNSLKAEDTAVYYCARGFPLLRHGAMDYWGQGTLVTVSSGGGGSGGGGSGGGGSDIQMTQSPSSLSASVGDRVTITCKASQNVDTNVAWYQQKPGQAPKSLIYSASYVYWDVPSRFSGSASGTDFTLTISSVQSEDFATYYCQQYDQQLITFGCGTKLEIKSGGGGSEVQLVESGGGLVQPGGSLKLSCAASGFTFNKYAMNWVRQAPGKGLEWVARIRSKYNNYATYYADSVKDRFTISRDDSKNTAYLQMNNLKTEDTAVYYCVRHGNFGNSYISYWAYWGQGTLVTVSSGGGGSGGGGSGGGGSQTVVTQEPSLTVSPGGTVTLTCGSSTGAVTSGNYPNWVQQKPGQAPRGLIGGTKFLAPGTPARFSGSLLGGKAALTLSGVQPEDEAEYYCVLWYSNRWVFGGGTKLTVLGGGGDKTHTCPPCPAPELLGGPSVFLFPPKPKDTLMISRTPEVTCVVVDVSHEDPEVKFNWYVDGVEVHNAKTKPCEEQYGSTYRCVSVLTVLHQDWLNGKEYKCKVSNKALPAPIEKTISKAKGQPREPQVYTLPPSREEMTKNQVSLTCLVKGFYPSDIAVEWESNGQPENNYKTTPPVLDSDGSFFLYSKLTVDKSRWQQGNVFSCSVMHEALHNHYTQKSLSLSPGKGGGGSGGGGSGGGGSGGGGSGGGGSGGGGSDKTHTCPPCPAPELLGGPSVFLFPPKPKDTLMISRTPEVTCVVVDVSHEDPEVKFNWYVDGVEVHNAKTKPCEEQYGSTYRCVSVLTVLHQDWLNGKEYKCKVSNKALPAPIEKTISKAKGQPREPQVYTLPPSREEMTKNQVSLTCLVKGFYPSDIAVEWESNGQPENNYKTTPPVLDSDGSFFLYSKLTVDKSRWQQGNVFSCSVMHEALHNHYTQKSLSLSPGK

SEQ ID NO: 831 - protein, 976 aa, Artificial Sequence
  Synthetic
QVQLVESGGGLVKPGESLRLSCAASGFTFSDYYMYWVRQAPGKCLEWVAIISDGGYYTYYSDIIKGRFTISRDNAKNSLYLQMNSLKAEDTAVYYCARGFPLLRHGAMDYWGQGTLVTVSSGGGGQGGGGQGGGGQEIQMTQSPSSLSASVGDRVTITCKASQNVDTNVAWYQQKPGQAPKSLIYSASYVYWDVPSRFSGSASGTDFTLTISSVQSEDFATYYCQQYDQQLITFGCGTKLEIKSGGGGQEVQLVESGGGLVQPGGSLKLSCAASGFTFNKYAMNWVRQAPGKGLEWVARIRSKYNNYATYYADSVKDRFTISRDDSKNTAYLQMNNLKTEDTAVYYCVRHGNFGNSYISYWAYWGQGTLVTVSSGGGGQGGGGQGGGGQQTVVTQEPSLTVSPGGTVTLTCGSSTGAVTSGNYPNWVQQKPGQAPRGLIGGTKFLAPGTPARFSGSLLGGKAALTLSGVQPEDEAEYYCVLWYSNRWVFGGGTKLTVLGGGGCPPCPAPELLGGPSVFLFPPKPKDTLMISRTPEVTCVVVDVSHEEPEVKFNWYVDGVEVHNAKTKPCEEQYGSTYRCVSVLTVLHQDWLNGKEYKCKVSNKALPAPIEKTISKAKGQPREPQVYTLPPSREEMTKNQVSLTCLVKGFYPSDIAVEWESNGQPENNYKTTPPVLDSDGSFFLYSKLTVDKSRWQQGNVFSCSVMHEALHNHYTQKSLSLSPGKGGGGQGGGGQGGGGQGGGGQGGGGQGGGGQCPPCPAPELLGGPSVFLFPPKPKDTLMISRTPEVTCVVVDVSHEEPEVKFNWYVDGVEVHNAKTKPCEEQYGSTYRCVSVLTVLHQDWLNGKEYKCKVSNKALPAPIEKTISKAKGQPREPQVYTLPPSREEMTKNQVSLTCLVKGFYPSDIAVEWESNGQPENNYKTTPPVLDSDGSFFLYSKLTVDKSRWQQGNVFSCSVMHEALHNHYTQKSLSLSPGK

SEQ ID NO: 832 - protein, 993 aa, Artificial Sequence
  Synthetic
QVQLVQSGAEVKKPGESVKVSCKASGYTFTNYGMNWVKQAPGQCLEWMGWINTYTGEPTYADKFQGRVTMTTDTSTSTAYMEIRNLGGDDTAVYYCARWSWSDGYYVYFDYWGQGTSVTVSSGGGGQGGGGQGGGGQDIVMTQSPDSLTVSLGERTTINCKSSQSVLDSSTNKNSLAWYQQKPGQPPKLLLSWASTRESGIPDRFSGSGSGTDFTLTIDSPQPEDSATYYCQQSAHFPITFGCGTRLEIKSGGGGQEVQLVESGGGLVQPGGSLKLSCAASGFTFNKYAMNWVRQAPGKGLEWVARIRSKYNNYATYYADSVKDRFTISRDDSKNTAYLQMNNLKTEDTAVYYCVRHGNFGNSYISYWAYWGQGTLVTVSSGGGGQGGGGQGGGGQQTVVTQEPSLTVSPGGTVTLTCGSSTGAVTSGNYPNWVQQKPGQAPRGLIGGTKFLAPGTPARFSGSLLGGKAALTLSGVQPEDEAEYYCVLWYSNRWVFGGGTKLTVLGGGGDKTHTCPPCPAPELLGGPSVFLFPPKPKDTLMISRTPEVTCVVVDVSHEDPEVKFNWYVDGVEVHNAKTKPCEEQYGSTYRCVSVLTVLHQDWLNGKEYKCKVSNKALPAPIEKTISKAKGQPREPQVYTLPPSREEMTKNQVSLTCLVKGFYPSDIAVEWESNGQPENNYKTTPPVLDSDGSFFLYSKLTVDKSRWQQGNVFSCSVMHEALHNHYTQKSLSLSPGKGGGGQGGGGQGGGGQGGGGQGGGGQGGGGQDKTHTCPPCPAPELLGGPSVFLFPPKPKDTLMISRTPEVTCVVVDVSHEDPEVKFNWYVDGVEVHNAKTKPCEEQYGSTYRCVSVLTVLHQDWLNGKEYKCKVSNKALPAPIEKTISKAKGQPREPQVYTLPPSREEMTKNQVSLTCLVKGFYPSDIAVEWESNGQPENNYKTTPPVLDSDGSFFLYSKLTVDKSRWQQGNVFSCSVMHEALHNHYTQKSLSLSPGK

SEQ ID NO: 833 - protein, 976 aa, Artificial Sequence
  Synthetic
QVQLVESGGGLVKPGESLRLSCAASGFTFSDYYMYWVRQAPGKCLEWVAIISDGGYYTYYSDIIKGRFTISRDNAKNSLYLQMNSLKAEDTAVYYCARGFPLLRHGAMDYWGQGTLVTVSSGGGGQGGGGQGGGGQDIQMTQSPSSLSASVGDRVTITCKASQNVDTNVAWYQQKPGQAPKSLIYSASYVYWDVPSRFSGSASGTDFTLTISSVQSEDFATYYCQQYDQQLITFGCGTKLEIKSGGGGQEVQLVESGGGLVQPGGSLKLSCAASGFTFNKYAINWVRQAPGKGLEWVARIRSKYNNYATYYADAVKDRFTISRDDSKNTVYLQMNNLKTEDTAVYYCARAGNFGSSYISYWAYCGQGTLVTVSSGGGGQGGGGQGGGGQQTVVTQEPSLTVSPGGTVTITCGSSTGAVTSGNYPNWVQKKPGQCPRGLIGGTKFLAPGTPARFSGSLSGGKAALTLSGVQPEDEAEYYCVLWYSNRWVFGSGTKLTVLGGGGCPPCPAPELLGGPSVFLFPPKPKDTLMISRTPEVTCVVVDVSHEEPEVKFNWYVDGVEVHNAKTKPCEEQYGSTYRCVSVLTVLHQDWLNGKEYKCKVSNKALPAPIEKTISKAKGQPREPQVYTLPPSREEMTKNQVSLTCLVKGFYPSDIAVEWESNGQPENNYKTTPPVLDSDGSFFLYSKLTVDKSRWQQGNVFSCSVMHEALHNHYTQKSLSLSPGKGGGGQGGGGQGGGGQGGGGQGGGGQGGGGQCPPCPAPELLGGPSVFLFPPKPKDTLMISRTPEVTCVVVDVSHEEPEVKFNWYVDGVEVHNAKTKPCEEQYGSTYRCVSVLTVLHQDWLNGKEYKCKVSNKALPAPIEKTISKAKGQPREPQVYTLPPSREEMTKNQVSLTCLVKGFYPSDIAVEWESNGQPENNYKTTPPVLDSDGSFFLYSKLTVDKSRWQQGNVFSCSVMHEALHNHYTQKSLSLSPGK

SEQ ID NO: 834 - protein, 976 aa, Artificial Sequence
  Synthetic
QVQLVESGGGLVKPGESLRLSCAASGFTFSDYYMYWVRQAPGKCLEWVAIISDGGYYTYYSDIIKGRFTISRDNAKNSLYLQMNSLKAEDTAVYYCARGFPLLRHGAMDYWGQGTLVTVSSGGGGQGGGGQGGGGQDIQMTQSPSSLSASVGDRVTITCKASQNVDTNVAWYQQKPGQAPKSLIYSASYVYWDVPSRFSGSASGTDFTLTISSVQSEDFATYYCQQYDQQLITFGCGTKLEIKSGGGGQEVQLVESGGGLVQPGGSLKLSCAASGFTFNKYAINWVRQAPGKGLEWVARIRSKYNNYATYYADAVKDRFTISRDDSKNTVYLQMNNLKTEDTAVYYCARAGNFGSSYISYWAYWGQGTLVTVSSGGGGQGGGGQGGGGQQTVVTQEPSLTVSPGGTVTITCGSSTGAVTSGNYPNWVQKKPGQAPRGLIGGTKFLAPGTPARFSGSLSGGKAALTLSGVQPEDEAEYYCVLWYSNRWVFGSGTKLTVLGGGGCPPCPAPELLGGPSVFLFPPKPKDTLMISRTPEVTCVVVDVSHEEPEVKFNWYVDGVEVHNAKTKPCEEQYGSTYRCVSVLTVLHQDWLNGKEYKCKVSNKALPAPIEKTISKAKGQPREPQVYTLPPSREEMTKNQVSLTCLVKGFYPSDIAVEWESNGQPENNYKTTPPVLDSDGSFFLYSKLTVDKSRWQQGNVFSCSVMHEALHNHYTQKSLSLSPGKGGGGQGGGGQGGGGQGGGGQGGGGQGGGGQCPPCPAPELLGGPSVFLFPPKPKDTLMISRTPEVTCVVVDVSHEEPEVKFNWYVDGVEVHNAKTKPCEEQYGSTYRCVSVLTVLHQDWLNGKEYKCKVSNKALPAPIEKTISKAKGQPREPQVYTLPPSREEMTKNQVSLTCLVKGFYPSDIAVEWESNGQPENNYKTTPPVLDSDGSFFLYSKLTVDKSRWQQGNVFSCSVMHEALHNHYTQKSLSLSPGK

SEQ ID NO: 835 - protein, 993 aa, Artificial Sequence
  Synthetic
QVQLVQSGAEVKKPGESVKVSCKASGYTFTNYGMNWVKQAPGQCLEWMGWINTYTGEPTYADKFQGRVTMTTDTSTSTAYMEIRNLGGDDTAVYYCARWSWSDGYYVYFDYWGQGTSVTVSSGGGGRGGGGRGGGGRDIVMTQSPDSLTVSLGERTTINCKSSQSVLDSSTNKNSLAWYQQKPGQPPKLLLSWASTRESGIPDRFSGSGSGTDFTLTIDSPQPEDSATYYCQQSAHFPITFGCGTRLEIKSGGGGREVQLVESGGGLVQPGGSLKLSCAASGFTFNKYAMNWVRQAPGKGLEWVARIRSKYNNYATYYADSVKDRFTISRDDSKNTAYLQMNNLKTEDTAVYYCVRHGNFGNSYISYWAYWGQGTLVTVSSGGGGRGGGGRGGGGRQTVVTQEPSLTVSPGGTVTLTCGSSTGAVTSGNYPNWVQQKPGQAPRGLIGGTKFLAPGTPARFSGSLLGGKAALTLSGVQPEDEAEYYCVLWYSNRWVFGGGTKLTVLGGGGDKTHTCPPCPAPELLGGPSVFLFPPKPKDTLMISRTPEVTCVVVDVSHEDPEVKFNWYVDGVEVHNAKTKPCEEQYGSTYRCVSVLTVLHQDWLNGKEYKCKVSNKALPAPIEKTISKAKGQPREPQVYTLPPSREEMTKNQVSLTCLVKGFYPSDIAVEWESNGQPENNYKTTPPVLDSDGSFFLYSKLTVDKSRWQQGNVFSCSVMHEALHNHYTQKSLSLSPGKGGGGRGGGGRGGGGRGGGGRGGGGRGGGGRDKTHTCPPCPAPELLGGPSVFLFPPKPKDTLMISRTPEVTCVVVDVSHEDPEVKFNWYVDGVEVHNAKTKPCEEQYGSTYRCVSVLTVLHQDWLNGKEYKCKVSNKALPAPIEKTISKAKGQPREPQVYTLPPSREEMTKNQVSLTCLVKGFYPSDIAVEWESNGQPENNYKTTPPVLDSDGSFFLYSKLTVDKSRWQQGNVFSCSVMHEALHNHYTQKSLSLSPGK

SEQ ID NO: 836 - protein, 983 aa, Artificial Sequence
  Synthetic
QVQLVQSGAEVKKPGESVKVSCKASGYTFTNYGMNWVKQAPGQCLEWMGWINTYTGEPTYADKFQGRVTMTTDTSTSTAYMEIRNLGGDDTAVYYCARWSWSDGYYVYFDYWGQGTSVTVSSGGGGRGGGGRGGGGRDIVMTQSPDSLTVSLGERTTINCKSSQSVLDSSTNKNSLAWYQQKPGQPPKLLLSWASTRESGIPDRFSGSGSGTDFTLTIDSPQPEDSATYYCQQSAHFPITFGCGTRLEIKSGGGGREVQLVESGGGLVQPGGSLKLSCAASGFTFNKYAMNWVRQAPGKGLEWVARIRSKYNNYATYYADSVKDRFTISRDDSKNTAYLQMNNLKTEDTAVYYCVRHGNFGNSYISYWAYWGQGTLVTVSSGGGGRGGGGRGGGGRQTVVTQEPSLTVSPGGTVTLTCGSSTGAVTSGNYPNWVQQKPGQAPRGLIGGTKFLAPGTPARFSGSLLGGKAALTLSGVQPEDEAEYYCVLWYSNRWVFGGGTKLTVLGGGGCPPCPAPELLGGPSVFLFPPKPKDTLMISRTPEVTCVVVDVSHEEPEVKFNWYVDGVEVHNAKTKPCEEQYGSTYRCVSVLTVLHQDWLNGKEYKCKVSNKALPAPIEKTISKAKGQPREPQVYTLPPSREEMTKNQVSLTCLVKGFYPSDIAVEWESNGQPENNYKTTPPVLDSDGSFFLYSKLTVDKSRWQQGNVFSCSVMHEALHNHYTQKSLSLSPGKGGGGRGGGGRGGGGRGGGGRGGGGRGGGGRCPPCPAPELLGGPSVFLFPPKPKDTLMISRTPEVTCVVVDVSHEEPEVKFNWYVDGVEVHNAKTKPCEEQYGSTYRCVSVLTVLHQDWLNGKEYKCKVSNKALPAPIEKTISKAKGQPREPQVYTLPPSREEMTKNQVSLTCLVKGFYPSDIAVEWESNGQPENNYKTTPPVLDSDGSFFLYSKLTVDKSRWQQGNVFSCSVMHEALHNHYTQKSLSLSPGK

SEQ ID NO: 837 - protein, 983 aa, Artificial Sequence
  Synthetic
QVQLVQSGAEVKKPGESVKVSCKASGYTFTNYGMNWVKQAPGQCLEWMGWINTYTGEPTYADKFQGRVTMTTDTSTSTAYMEIRNLGGDDTAVYYCARWSWSDGYYVYFDYWGQGTSVTVSSGGGGQGGGGQGGGGQDIVMTQSPDSLTVSLGERTTINCKSSQSVLDSSTNKNSLAWYQQKPGQPPKLLLSWASTRESGIPDRFSGSGSGTDFTLTIDSPQPEDSATYYCQQSAHFPITFGCGTRLEIKSGGGGQEVQLVESGGGLVQPGGSLKLSCAASGFTFNKYAMNWVRQAPGKGLEWVARIRSKYNNYATYYADSVKDRFTISRDDSKNTAYLQMNNLKTEDTAVYYCVRHGNFGNSYISYWAYWGQGTLVTVSSGGGGQGGGGQGGGGQQTVVTQEPSLTVSPGGTVTLTCGSSTGAVTSGNYPNWVQQKPGQAPRGLIGGTKFLAPGTPARFSGSLLGGKAALTLSGVQPEDEAEYYCVLWYSNRWVFGGGTKLTVLGGGGCPPCPAPELLGGPSVFLFPPKPKDTLMISRTPEVTCVVVDVSHEEPEVKFNWYVDGVEVHNAKTKPCEEQYGSTYRCVSVLTVLHQDWLNGKEYKCKVSNKALPAPIEKTISKAKGQPREPQVYTLPPSREEMTKNQVSLTCLVKGFYPSDIAVEWESNGQPENNYKTTPPVLDSDGSFFLYSKLTVDKSRWQQGNVFSCSVMHEALHNHYTQKSLSLSPGKGGGGQGGGGQGGGGQGGGGQGGGGQGGGGQCPPCPAPELLGGPSVFLFPPKPKDTLMISRTPEVTCVVVDVSHEEPEVKFNWYVDGVEVHNAKTKPCEEQYGSTYRCVSVLTVLHQDWLNGKEYKCKVSNKALPAPIEKTISKAKGQPREPQVYTLPPSREEMTKNQVSLTCLVKGFYPSDIAVEWESNGQPENNYKTTPPVLDSDGSFFLYSKLTVDKSRWQQGNVFSCSVMHEALHNHYTQKSLSLSPGK

SEQ ID NO: 838 - protein, 1236 aa, Artificial Sequence
  Synthetic
DIQMTQSPSSLSASVGDRVTITCKASQDVSTAVAWYQQKPGKAPKLLIYSASYRYTGVPDRFTGSGSGTDFTLTISSLQPEDFATYYCQQHYSTPPYTFGCGTKVEIKRGGGGSGGGGSGGGGSQVQLVQSGAEVKKPGASVKVSCKASGYAFSSSWMNWVRQAPGQCLEWIGRIYPGDADAKYNAKFKGKATLTADKSTSTAYMELSSLRSEDTAVYYCARSTMIATGAMDYWGQGTLVTVSSSGGGGSQVQLVQSGAEVKKPGASVKVSCKASGYTFTNHIIHWVRQAPGQCLEWMGYINPYPGYHAYNEKFQGRATMTSDTSTSTVYMELSSLRSEDTAVYYCARDGYYRDTDVLDYWGQGTLVTVSSGGGGSGGGGSGGGGSDIQMTQSPSSLSASVGDRVTITCQASQDISNYLNWYQQKPGKAPKLLIYYTSRLHTGVPSRFSGSGSGTDFTFTISSLEPEDIATYYCQQGNTLPWTFGCGTKVEIKSGGGGSEVQLVESGGGLVQPGGSLKLSCAASGFTFNKYAMNWVRQAPGKGLEWVARIRSKYNNYATYYADSVKDRFTISRDDSKNTAYLQMNNLKTEDTAVYYCVRHGNFGNSYISYWAYWGQGTLVTVSSGGGGSGGGGSGGGGSQTVVTQEPSLTVSPGGTVTLTCGSSTGAVTSGNYPNWVQQKPGQAPRGLIGGTKFLAPGTPARFSGSLLGGKAALTLSGVQPEDEAEYYCVLWYSNRWVFGGGTKLTVLGGGGDKTHTCPPCPAPELLGGPSVFLFPPKPKDTLMISRTPEVTCVVVDVSHEDPEVKFNWYVDGVEVHNAKTKPCEEQYGSTYRCVSVLTVLHQDWLNGKEYKCKVSNKALPAPIEKTISKAKGQPREPQVYTLPPSREEMTKNQVSLTCLVKGFYPSDIAVEWESNGQPENNYKTTPPVLDSDGSFFLYSKLTVDKSRWQQGNVFSCSVMHEALHNHYTQKSLSLSPGKGGGGSGGGGSGGGGSGGGGSGGGGSGGGGSDKTHTCPPCPAPELLGGPSVFLFPPKPKDTLMISRTPEVTCVVVDVSHEDPEVKFNWYVDGVEVHNAKTKPCEEQYGSTYRCVSVLTVLHQDWLNGKEYKCKVSNKALPAPIEKTISKAKGQPREPQVYTLPPSREEMTKNQVSLTCLVKGFYPSDIAVEWESNGQPENNYKTTPPVLDSDGSFFLYSKLTVDKSRWQQGNVFSCSVMHEALHNHYTQKSLSLSPGK

SEQ ID NO: 839 - protein, 1225 aa, Artificial Sequence
  Synthetic
DIQMTQSPSSLSASVGDRVTITCKASQDVSTAVAWYQQKPGKAPKLLIYSASYRYTGVPDRFTGSGSGTDFTLTISSLQPEDFATYYCQQHYSTPPYTFGCGTKVEIKRGGGGQGGGGQGGGGQQVQLVQSGAEVKKPGASVKVSCKASGYAFSSSWMNWVRQAPGQCLEWIGRIYPGDADAKYNAKFKGKATLTADKSTSTAYMELSSLRSEDTAVYYCARSTMIATGAMDYWGQGTLVTVSSGGGGQQVQLVQSGAEVKKPGASVKVSCKASGYTFTNHIIHWVRQAPGQCLEWMGYINPYPGYHAYNEKFQGRATMTSDTSTSTVYMELSSLRSEDTAVYYCARDGYYRDTDVLDYWGQGTLVTVSSGGGGQGGGGQGGGGQEIQMTQSPSSLSASVGDRVTITCQASQDISNYLNWYQQKPGKAPKLLIYYTSRLHTGVPSRFSGSGSGTDFTFTISSLEPEDIATYYCQQGNTLPWTFGCGTKVEIKSGGGGQEVQLVESGGGLVQPGGSLKLSCAASGFTFNKYAMNWVRQAPGKGLEWVARIRSKYNNYATYYADSVKDRFTISRDDSKNTAYLQMNNLKTEDTAVYYCVRHGNFGNSYISYWAYWGQGTLVTVSSGGGGQGGGGQGGGGQQTVVTQEPSLTVSPGGTVTLTCGSSTGAVTSGNYPNWVQQKPGQAPRGLIGGTKFLAPGTPARFSGSLLGGKAALTLSGVQPEDEAEYYCVLWYSNRWVFGGGTKLTVLGGGGCPPCPAPELLGGPSVFLFPPKPKDTLMISRTPEVTCVVVDVSHEEPEVKFNWYVDGVEVHNAKTKPCEEQYGSTYRCVSVLTVLHQDWLNGKEYKCKVSNKALPAPIEKTISKAKGQPREPQVYTLPPSREEMTKNQVSLTCLVKGFYPSDIAVEWESNGQPENNYKTTPPVLDSDGSFFLYSKLTVDKSRWQQGNVFSCSVMHEALHNHYTQKSLSLSPGKGGGGQGGGGQGGGGQGGGGQGGGGQGGGGQCPPCPAPELLGGPSVFLFPPKPKDTLMISRTPEVTCVVVDVSHEEPEVKFNWYVDGVEVHNAKTKPCEEQYGSTYRCVSVLTVLHQDWLNGKEYKCKVSNKALPAPIEKTISKAKGQPREPQVYTLPPSREEMTKNQVSLTCLVKGFYPSDIAVEWESNGQPENNYKTTPPVLDSDGSFFLYSKLTVDKSRWQQGNVFSCSVMHEALHNHYTQKSLSLSPGK

SEQ ID NO: 840 - protein, 1224 aa, Artificial Sequence
  Synthetic
DIQMTQSPSSLSASVGDRVTITCKASQDVSTAVAWYQQKPGKAPKLLIYSASYRYTGVPDRFTGSGSGTDFTLTISSLQPEDFATYYCQQHYSTPPYTFGCGTKVEIKGGGGQGGGGQGGGGQQVQLVQSGAEVKKPGASVKVSCKASGYAFSSSWMNWVRQAPGQCLEWIGRIYPGDADAKYNAKFKGKATLTADKSTSTAYMELSSLRSEDTAVYYCARSTMIATGAMDYWGQGTLVTVSSGGGGQQVQLVQSGAEVKKPGASVKVSCKASGYTFTNHIIHWVRQAPGQCLEWMGYINPYPGYHAYNEKFQGRATMTSDTSTSTVYMELSSLRSEDTAVYYCARDGYYRDTDVLDYWGQGTLVTVSSGGGGQGGGGQGGGGQEIQMTQSPSSLSASVGDRVTITCQASQDISNYLNWYQQKPGKAPKLLIYYTSRLHTGVPSRFSGSGSGTDFTFTISSLEPEDIATYYCQQGNTLPWTFGCGTKVEIKSGGGGQEVQLVESGGGLVQPGGSLKLSCAASGFTFNKYAMNWVRQAPGKGLEWVARIRSKYNNYATYYADSVKDRFTISRDDSKNTAYLQMNNLKTEDTAVYYCVRHGNFGNSYISYWAYWGQGTLVTVSSGGGGQGGGGQGGGGQQTVVTQEPSLTVSPGGTVTLTCGSSTGAVTSGNYPNWVQQKPGQAPRGLIGGTKFLAPGTPARFSGSLLGGKAALTLSGVQPEDEAEYYCVLWYSNRWVFGGGTKLTVLGGGGCPPCPAPELLGGPSVFLFPPKPKDTLMISRTPEVTCVVVDVSHEEPEVKFNWYVDGVEVHNAKTKPCEEQYGSTYRCVSVLTVLHQDWLNGKEYKCKVSNKALPAPIEKTISKAKGQPREPQVYTLPPSREEMTKNQVSLTCLVKGFYPSDIAVEWESNGQPENNYKTTPPVLDSDGSFFLYSKLTVDKSRWQQGNVFSCSVMHEALHNHYTQKSLSLSPGKGGGGQGGGGQGGGGQGGGGQGGGGQGGGGQCPPCPAPELLGGPSVFLFPPKPKDTLMISRTPEVTCVVVDVSHEEPEVKFNWYVDGVEVHNAKTKPCEEQYGSTYRCVSVLTVLHQDWLNGKEYKCKVSNKALPAPIEKTISKAKGQPREPQVYTLPPSREEMTKNQVSLTCLVKGFYPSDIAVEWESNGQPENNYKTTPPVLDSDGSFFLYSKLTVDKSRWQQGNVFSCSVMHEALHNHYTQKSLSLSPGK

SEQ ID NO: 841 - protein, 1234 aa, Artificial Sequence
  Synthetic
DIQMTQSPSSLSASVGDRVTITCKASQDVSTAVAWYQQKPGKAPKLLIYSASYRYTGVPDRFTGSGSGTDFTLTISSLQPEDFATYYCQQHYSTPPYTFGCGTKVEIKGGGGSGGGGSGGGGSQVQLVQSGAEVKKPGASVKVSCKASGYAFSSSWMNWVRQAPGQCLEWIGRIYPGDADAKYNAKFKGKATLTADKSTSTAYMELSSLRSEDTAVYYCARSTMIATGAMDYWGQGTLVTVSSGGGGSQVQLVQSGAEVKKPGASVKVSCKASGYTFTNHIIHWVRQAPGQCLEWMGYINPYPGYHAYNEKFQGRATMTSDTSTSTVYMELSSLRSEDTAVYYCARDGYYRDTDVLDYWGQGTLVTVSSGGGGSGGGGSGGGGSDIQMTQSPSSLSASVGDRVTITCQASQDISNYLNWYQQKPGKAPKLLIYYTSRLHTGVPSRFSGSGSGTDFTFTISSLEPEDIATYYCQQGNTLPWTFGCGTKVEIKSGGGGSEVQLVESGGGLVQPGGSLKLSCAASGFTFNKYAMNWVRQAPGKGLEWVARIRSKYNNYATYYADSVKDRFTISRDDSKNTAYLQMNNLKTEDTAVYYCVRHGNFGNSYISYWAYWGQGTLVTVSSGGGGSGGGGSGGGGSQTVVTQEPSLTVSPGGTVTLTCGSSTGAVTSGNYPNWVQQKPGQAPRGLIGGTKFLAPGTPARFSGSLLGGKAALTLSGVQPEDEAEYYCVLWYSNRWVFGGGTKLTVLGGGGDKTHTCPPCPAPELLGGPSVFLFPPKPKDTLMISRTPEVTCVVVDVSHEDPEVKFNWYVDGVEVHNAKTKPCEEQYGSTYRCVSVLTVLHQDWLNGKEYKCKVSNKALPAPIEKTISKAKGQPREPQVYTLPPSREEMTKNQVSLTCLVKGFYPSDIAVEWESNGQPENNYKTTPPVLDSDGSFFLYSKLTVDKSRWQQGNVFSCSVMHEALHNHYTQKSLSLSPGKGGGGSGGGGSGGGGSGGGGSGGGGSGGGGSDKTHTCPPCPAPELLGGPSVFLFPPKPKDTLMISRTPEVTCVVVDVSHEDPEVKFNWYVDGVEVHNAKTKPCEEQYGSTYRCVSVLTVLHQDWLNGKEYKCKVSNKALPAPIEKTISKAKGQPREPQVYTLPPSREEMTKNQVSLTCLVKGFYPSDIAVEWESNGQPENNYKTTPPVLDSDGSFFLYSKLTVDKSRWQQGNVFSCSVMHEALHNHYTQKSLSLSPGK

SEQ ID NO: 842 - protein, 1242 aa, Artificial Sequence
  Synthetic
QVTLKESGPTLVKPTETLTLTCTLSGFSLNNARMGVSWIRQPPGKCLEWLAHIFSNDEKSYSTSLKNRLTISKDSSKTQVVLTMTNVDPVDTATYYCARIVGYGSGWYGFFDYWGQGTLVTVSSGGGGSGGGGSGGGGSDIQMTQSPSSLSASVGDRVTITCRASQGIRNDLGWYQQKPGKAPKRLIYAASTLQSGVPSRFSGSGSGTEFTLTISSLQPEDFATYYCLQHNSYPLTFGCGTKVEIKSGGGGSEVQLLESGGGLVQPGGSLRLSCAASGFTFSHYAMSWVRQAPGKCLEWVSAVSGGGDKTLYADAVKGRFTISRDNSKNTLFLQMNSLRAEDTAIYYCARLRGFYYGMDVWGQGTTVTVSSGGGGSGGGGSGGGGSDIVLTQSPLSLPVTPGEPASISCRSSQSLLHSNKYNYLDWYLQKPGQSPQLLIYLGSNRASGVPDRFSGSGSGTDFTLKISRVEAEDVGVYYCMQALQTPPITFGCGTRLEIKSGGGGSEVQLVESGGGLVQPGGSLKLSCAASGFTFNKYAMNWVRQAPGKGLEWVARIRSKYNNYATYYADSVKDRFTISRDDSKNTAYLQMNNLKTEDTAVYYCVRHGNFGNSYISYWAYWGQGTLVTVSSGGGGSGGGGSGGGGSQTVVTQEPSLTVSPGGTVTLTCGSSTGAVTSGNYPNWVQQKPGQAPRGLIGGTKFLAPGTPARFSGSLLGGKAALTLSGVQPEDEAEYYCVLWYSNRWVFGGGTKLTVLGGGGDKTHTCPPCPAPELLGGPSVFLFPPKPKDTLMISRTPEVTCVVVDVSHEDPEVKFNWYVDGVEVHNAKTKPCEEQYGSTYRCVSVLTVLHQDWLNGKEYKCKVSNKALPAPIEKTISKAKGQPREPQVYTLPPSREEMTKNQVSLTCLVKGFYPSDIAVEWESNGQPENNYKTTPPVLDSDGSFFLYSKLTVDKSRWQQGNVFSCSVMHEALHNHYTQKSLSLSPGKGGGGSGGGGSGGGGSGGGGSGGGGSGGGGSDKTHTCPPCPAPELLGGPSVFLFPPKPKDTLMISRTPEVTCVVVDVSHEDPEVKFNWYVDGVEVHNAKTKPCEEQYGSTYRCVSVLTVLHQDWLNGKEYKCKVSNKALPAPIEKTISKAKGQPREPQVYTLPPSREEMTKNQVSLTCLVKGFYPSDIAVEWESNGQPENNYKTTPPVLDSDGSFFLYSKLTVDKSRWQQGNVFSCSVMHEALHNHYTQKSLSLSPGK

SEQ ID NO: 843 - protein, 1232 aa, Artificial Sequence
  Synthetic
QVTLKESGPTLVKPTETLTLTCTLSGFSLNNARMGVSWIRQPPGKCLEWLAHIFSNDEKSYSTSLKNRLTISKDSSKTQVVLTMTNVDPVDTATYYCARIVGYGSGWYGFFDYWGQGTLVTVSSGGGGQGGGGQGGGGQEIQMTQSPSSLSASVGDRVTITCRASQGIRNDLGWYQQKPGKAPKRLIYAASTLQSGVPSRFSGSGSGTEFTLTISSLQPEDFATYYCLQHNSYPLTFGCGTKVEIKSGGGGQEVQLLESGGGLVQPGGSLRLSCAASGFTFSHYAMSWVRQAPGKCLEWVSAVSGGGDKTLYADAVKGRFTISRDNSKNTLFLQMNSLRAEDTAIYYCARLRGFYYGMDVWGQGTTVTVSSGGGGQGGGGQGGGGQEIVLTQSPLSLPVTPGEPASISCRSSQSLLHSNKYNYLDWYLQKPGQSPQLLIYLGSNRASGVPDRFSGSGSGTDFTLKISRVEAEDVGVYYCMQALQTPPITFGCGTRLEIKSGGGGQEVQLVESGGGLVQPGGSLKLSCAASGFTFNKYAMNWVRQAPGKGLEWVARIRSKYNNYATYYADSVKDRFTISRDDSKNTAYLQMNNLKTEDTAVYYCVRHGNFGNSYISYWAYWGQGTLVTVSSGGGGQGGGGQGGGGQQTVVTQEPSLTVSPGGTVTLTCGSSTGAVTSGNYPNWVQQKPGQAPRGLIGGTKFLAPGTPARFSGSLLGGKAALTLSGVQPEDEAEYYCVLWYSNRWVFGGGTKLTVLGGGGCPPCPAPELLGGPSVFLFPPKPKDTLMISRTPEVTCVVVDVSHEEPEVKFNWYVDGVEVHNAKTKPCEEQYGSTYRCVSVLTVLHQDWLNGKEYKCKVSNKALPAPIEKTISKAKGQPREPQVYTLPPSREEMTKNQVSLTCLVKGFYPSDIAVEWESNGQPENNYKTTPPVLDSDGSFFLYSKLTVDKSRWQQGNVFSCSVMHEALHNHYTQKSLSLSPGKGGGGQGGGGQGGGGQGGGGQGGGGQGGGGQCPPCPAPELLGGPSVFLFPPKPKDTLMISRTPEVTCVVVDVSHEEPEVKFNWYVDGVEVHNAKTKPCEEQYGSTYRCVSVLTVLHQDWLNGKEYKCKVSNKALPAPIEKTISKAKGQPREPQVYTLPPSREEMTKNQVSLTCLVKGFYPSDIAVEWESNGQPENNYKTTPPVLDSDGSFFLYSKLTVDKSRWQQGNVFSCSVMHEALHNHYTQKSLSLSPGK

SEQ ID NO: 844 - protein, 1474 aa, Artificial Sequence
  Synthetic
QVQLVQSGAEVKKPGASVKVSCKASGYTFTNYWMNWVRQAPGQCLEWMGNIAYGVKGTNYNQKFQGRVTMTVDTSSSTAYMELSRLRSDDTAVYYCATRYFYVMDYWGQGTLVTVSSGGGGQGGGGQGGGGQEIQMTQSPSSLSASVGDRVTITCRASQDISNYLNWYQQKPGKVPKLLIYYTSRLHSGVPSRFSGSGSGTDFTLTISSLQPEDVATYYCVQYAQFPLTFGCGTKVEIKSGGGGQEVQLVESGGGLVQPGGSLKLSCAASGFTFNKYAMNWVRQAPGKGMEWVARIRSKYNNYATYYADAVKDRFTISRDDSKNTLYLQMNNLKTEDTAVYYCVRAGNFGSSYISYFAYWGQGTLVTVSSGGGGQGGGGQGGGGQQTVVTQEPSLTVSPGGTVTITCGSSTGAVTSGNYPNWIQKKPGQAPRGLIGGTKFLAPGTPARFSGSLEGGKAALTLSGVQPEDEAEYYCVLYYSNRWVFGSGTKLTVLGGGGCPPCPAPELLGGPSVFLFPPKPKDTLMISRTPEVTCVVVDVSHEEPEVKFNWYVDGVEVHNAKTKPCEEQYGSTYRCVSVLTVLHQDWLNGKEYKCKVSNKALPAPIEKTISKAKGQPREPQVYTLPPSREEMTKNQVSLTCLVKGFYPSDIAVEWESNGQPENNYKTTPPVLDSDGSFFLYSKLTVDKSRWQQGNVFSCSVMHEALHNHYTQKSLSLSPGKGGGGQGGGGQGGGGQGGGGQGGGGQGGGGQCPPCPAPELLGGPSVFLFPPKPKDTLMISRTPEVTCVVVDVSHEEPEVKFNWYVDGVEVHNAKTKPCEEQYGSTYRCVSVLTVLHQDWLNGKEYKCKVSNKALPAPIEKTISKAKGQPREPQVYTLPPSREEMTKNQVSLTCLVKGFYPSDIAVEWESNGQPENNYKTTPPVLDSDGSFFLYSKLTVDKSRWQQGNVFSCSVMHEALHNHYTQKSLSLSPGKGGGGQVQLQESGPGLVKPSETLSLTCTVSGGSISSSSYFWGWIRQPPGKCLEWIGNIYYSGSSNYNPSLKSRVTISVDTSKNQFSLKLSSVTAADTAVYYCARLPRGDRDAFDIWGQGTMVTVSSGGGGQGGGGQGGGGQEIVMTQSPSSLSASVGDRVTITCRASQGISNYLAWYQQKPGKVPKLLIYAASTLQSGVPSRFSGSGSGTDFTLTISSLQPEDFATYYCQQSYSTPFTFGCGTKVEIKSGGGGQEVQLVESGGGLVQPGGSLKLSCAASGFTFNKYAMNWVRQAPGKGMEWVARIRSKYNNYATYYADAVKDRFTISRDDSKNTLYLQMNNLKTEDTAVYYCVRAGNFGSSYISYFAYWGQGTLVTVSSGGGGQGGGGQGGGGQQTVVTQEPSLTVSPGGTVTITCGSSTGAVTSGNYPNWIQKKPGQAPRGLIGGTKFLAPGTPARFSGSLEGGKAALTLSGVQPEDEAEYYCVLYYSNRWVFGSGTKLTVL

SEQ ID NO: 845 - protein, 1484 aa, Artificial Sequence
  Synthetic
QVQLVQSGAEVKKPGASVKVSCKASGYTFTNYWMNWVRQAPGQCLEWMGNIAYGVKGTNYNQKFQGRVTMTVDTSSSTAYMELSRLRSDDTAVYYCATRYFYVMDYWGQGTLVTVSSGGGGSGGGGSGGGGSDIQMTQSPSSLSASVGDRVTITCRASQDISNYLNWYQQKPGKVPKLLIYYTSRLHSGVPSRFSGSGSGTDFTLTISSLQPEDVATYYCVQYAQFPLTFGCGTKVEIKSGGGGSEVQLVESGGGLVQPGGSLKLSCAASGFTFNKYAMNWVRQAPGKGMEWVARIRSKYNNYATYYADAVKDRFTISRDDSKNTLYLQMNNLKTEDTAVYYCVRAGNFGSSYISYFAYWGQGTLVTVSSGGGGSGGGGSGGGGSQTVVTQEPSLTVSPGGTVTITCGSSTGAVTSGNYPNWIQKKPGQAPRGLIGGTKFLAPGTPARFSGSLEGGKAALTLSGVQPEDEAEYYCVLYYSNRWVFGSGTKLTVLGGGGDKTHTCPPCPAPELLGGPSVFLFPPKPKDTLMISRTPEVTCVVVDVSHEDPEVKFNWYVDGVEVHNAKTKPCEEQYGSTYRCVSVLTVLHQDWLNGKEYKCKVSNKALPAPIEKTISKAKGQPREPQVYTLPPSREEMTKNQVSLTCLVKGFYPSDIAVEWESNGQPENNYKTTPPVLDSDGSFFLYSKLTVDKSRWQQGNVFSCSVMHEALHNHYTQKSLSLSPGKGGGGSGGGGSGGGGSGGGGSGGGGSGGGGSDKTHTCPPCPAPELLGGPSVFLFPPKPKDTLMISRTPEVTCVVVDVSHEDPEVKFNWYVDGVEVHNAKTKPCEEQYGSTYRCVSVLTVLHQDWLNGKEYKCKVSNKALPAPIEKTISKAKGQPREPQVYTLPPSREEMTKNQVSLTCLVKGFYPSDIAVEWESNGQPENNYKTTPPVLDSDGSFFLYSKLTVDKSRWQQGNVFSCSVMHEALHNHYTQKSLSLSPGKGGGGQVQLQESGPGLVKPSETLSLTCTVSGGSISSSSYFWGWIRQPPGKCLEWIGNIYYSGSSNYNPSLKSRVTISVDTSKNQFSLKLSSVTAADTAVYYCARLPRGDRDAFDIWGQGTMVTVSSGGGGSGGGGSGGGGSDIVMTQSPSSLSASVGDRVTITCRASQGISNYLAWYQQKPGKVPKLLIYAASTLQSGVPSRFSGSGSGTDFTLTISSLQPEDFATYYCQQSYSTPFTFGCGTKVEIKSGGGGSEVQLVESGGGLVQPGGSLKLSCAASGFTFNKYAMNWVRQAPGKGMEWVARIRSKYNNYATYYADAVKDRFTISRDDSKNTLYLQMNNLKTEDTAVYYCVRAGNFGSSYISYFAYWGQGTLVTVSSGGGGSGGGGSGGGGSQTVVTQEPSLTVSPGGTVTITCGSSTGAVTSGNYPNWIQKKPGQAPRGLIGGTKFLAPGTPARFSGSLEGGKAALTLSGVQPEDEAEYYCVLYYSNRWVFGSGTKLTVL

SEQ ID NO: 846 - protein, 1474 aa, Artificial Sequence
  Synthetic
QVQLVQSGAEVKKPGASVKVSCKASGYTFTNYWMNWVRQAPGQCLEWMGNIAYGVKGTNYNQKFQGRVTMTVDTSSSTAYMELSRLRSDDTAVYYCATRYFYVMDYWGQGTLVTVSSGGGGQGGGGQGGGGQDIQMTQSPSSLSASVGDRVTITCRASQDISNYLNWYQQKPGKVPKLLIYYTSRLHSGVPSRFSGSGSGTDFTLTISSLQPEDVATYYCVQYAQFPLTFGCGTKVEIKSGGGGQEVQLVESGGGLVQPGGSLKLSCAASGFTFNKYAMNWVRQAPGKGMEWVARIRSKYNNYATYYADAVKDRFTISRDDSKNTLYLQMNNLKTEDTAVYYCVRAGNFGSSYISYFAYWGQGTLVTVSSGGGGQGGGGQGGGGQQTVVTQEPSLTVSPGGTVTITCGSSTGAVTSGNYPNWIQKKPGQAPRGLIGGTKFLAPGTPARFSGSLEGGKAALTLSGVQPEDEAEYYCVLYYSNRWVFGSGTKLTVLGGGGCPPCPAPELLGGPSVFLFPPKPKDTLMISRTPEVTCVVVDVSHEEPEVKFNWYVDGVEVHNAKTKPCEEQYGSTYRCVSVLTVLHQDWLNGKEYKCKVSNKALPAPIEKTISKAKGQPREPQVYTLPPSREEMTKNQVSLTCLVKGFYPSDIAVEWESNGQPENNYKTTPPVLDSDGSFFLYSKLTVDKSRWQQGNVFSCSVMHEALHNHYTQKSLSLSPGKGGGGQGGGGQGGGGQGGGGQGGGGQGGGGQCPPCPAPELLGGPSVFLFPPKPKDTLMISRTPEVTCVVVDVSHEEPEVKFNWYVDGVEVHNAKTKPCEEQYGSTYRCVSVLTVLHQDWLNGKEYKCKVSNKALPAPIEKTISKAKGQPREPQVYTLPPSREEMTKNQVSLTCLVKGFYPSDIAVEWESNGQPENNYKTTPPVLDSDGSFFLYSKLTVDKSRWQQGNVFSCSVMHEALHNHYTQKSLSLSPGKGGGGQVQLQESGPGLVKPSETLSLTCTVSGGSISSSSYFWGWIRQPPGKCLEWIGNIYYSGSSNYNPSLKSRVTISVDTSKNQFSLKLSSVTAADTAVYYCARLPRGDRDAFDIWGQGTMVTVSSGGGGQGGGGQGGGGQDIVMTQSPSSLSASVGDRVTITCRASQGISNYLAWYQQKPGKVPKLLIYAASTLQSGVPSRFSGSGSGTDFTLTISSLQPEDFATYYCQQSYSTPFTFGCGTKVEIKSGGGGQEVQLVESGGGLVQPGGSLKLSCAASGFTFNKYAMNWVRQAPGKGMEWVARIRSKYNNYATYYADAVKDRFTISRDDSKNTLYLQMNNLKTEDTAVYYCVRAGNFGSSYISYFAYWGQGTLVTVSSGGGGQGGGGQGGGGQQTVVTQEPSLTVSPGGTVTITCGSSTGAVTSGNYPNWIQKKPGQAPRGLIGGTKFLAPGTPARFSGSLEGGKAALTLSGVQPEDEAEYYCVLYYSNRWVFGSGTKLTVL

SEQ ID NO: 847 - protein, 105 aa, Artificial Sequence
  Synthetic
QDGNEEMGGITQTPYKVSISGTTVILTCPQYPGSEILWQHNDKNIGGDEDDKNIGSDEDHLSLKEFSELEQSGYYVCYPRGSKPEDANFYLYLRARVCENCMEMD

SEQ ID NO: 848 - protein, 27 aa, Artificial Sequence
  Synthetic
QDGNEEMGGITQTPYKVSISGTTVILT

SEQ ID NO: 849 - protein, 484 aa, Artificial Sequence
  Synthetic
DKTHTCPPCPAPELLGGPSVFLFPPKPKDTLMISRTPEVTCVVVDVSHEDPEVKFNWYVDGVEVHNAKTKPCEEQYGSTYRCVSVLTVLHQDWLNGKEYKCKVSNKALPAPIEKTISKAKGQPREPQVYTLPPSREEMTKNQVSLTCLVKGFYPSDIAVEWESNGQPENNYKTTPPVLDSDGSFFLYSKLTVDKSRWQQGNVFSCSVMHEALHNHYTQKSLSLSPGKGGGGSGGGGSGGGGSGGGGSGGGGSGGGGSDKTHTCPPCPAPELLGGPSVFLFPPKPKDTLMISRTPEVTCVVVDVSHEDPEVKFNWYVDGVEVHNAKTKPCEEQYGSTYRCVSVLTVLHQDWLNGKEYKCKVSNKALPAPIEKTISKAKGQPREPQVYTLPPSREEMTKNQVSLTCLVKGFYPSDIAVEWESNGQPENNYKTTPPVLDSDGSFFLYSKLTVDKSRWQQGNVFSCSVMHEALHNHYTQKSLSLSPGK

SEQ ID NO: 850 - protein, 474 aa, Artificial Sequence
  Synthetic
CPPCPAPELLGGPSVFLFPPKPKDTLMISRTPEVTCVVVDVSHEEPEVKFNWYVDGVEVHNAKTKPCEEQYGSTYRCVSVLTVLHQDWLNGKEYKCKVSNKALPAPIEKTISKAKGQPREPQVYTLPPSREEMTKNQVSLTCLVKGFYPSDIAVEWESNGQPENNYKTTPPVLDSDGSFFLYSKLTVDKSRWQQGNVFSCSVMHEALHNHYTQKSLSLSPGKGGGGQGGGGQGGGGQGGGGQGGGGQGGGGQCPPCPAPELLGGPSVFLFPPKPKDTLMISRTPEVTCVVVDVSHEEPEVKFNWYVDGVEVHNAKTKPCEEQYGSTYRCVSVLTVLHQDWLNGKEYKCKVSNKALPAPIEKTISKAKGQPREPQVYTLPPSREEMTKNQVSLTCLVKGFYPSDIAVEWESNGQPENNYKTTPPVLDSDGSFFLYSKLTVDKSRWQQGNVFSCSVMHEALHNHYTQKSLSLSPGK

1. A polypeptide or polypeptide construct comprising a first target antigen binding domain, wherein said first target antigen binding domain comprises a VH and a VL variable region linked by a peptide linker, wherein the peptide linker comprises or consists of S(G4X)n or (G4X)n, wherein X is selected from the group consisting of Q, T, N, C, G, A, V, I, L, and M, and wherein n is an integer selected from integers 1 to 20.

2. The polypeptide or polypeptide construct of claim 1, wherein n is 1, 2, 3, 4, 5 or 6.

3. The polypeptide or polypeptide construct of claim 1 or 2, wherein X is Q.

4. The polypeptide or polypeptide construct of any one of claims 1 to 3, wherein the peptide linker is S(G4X)n or (G4X)n, n is 3, and X is Q.

5. The polypeptide or polypeptide construct of any one of claims 1 to 4, comprising at least one further binding domain binding to a target antigen.

6. The polypeptide or polypeptide construct of claim 5, wherein the at least one further target antigen binding domain comprises the same components as the first target antigen binding domain.

7. The polypeptide or polypeptide construct of claim 5 or 6, wherein each target antigen binding domain binds to one target antigen.

8. The polypeptide or polypeptide construct of any one of claims 5 to 7, wherein said polypeptide or polypeptide comprises:
Binding Domain 1 (VH/VL-Peptide Linker-VH/VL)-Linker-Binding Domain 2 (VH/VL-Peptide Linker-VH/VL)

9. The polypeptide or polypeptide construct of claim 8, wherein said polypeptide or polypeptide construct comprises:
Binding Domain 1 (VH/VL-Peptide Linker-VH/VL)-Linker-Binding Domain 2 (VH/VL-Peptide Linker-VH/VL)-Binding Domain 3 (VH/VL-Peptide Linker-VH/VL)

10. The polypeptide or polypeptide construct of claims 8 to 9, wherein the C-terminal binding domain is binding to CD3, and wherein said remaining N-terminal binding domain(s) is/are binding to a cell surface antigen.

11. The polypeptide or polypeptide construct of any one of claims 8 to 10, wherein the linker linking the binding domains comprises or consists of S(G4X)n or (G4X)n, wherein X is selected from the group consisting of Q, T, N, C, G, A, V, I, L, and M, and wherein n is an integer selected from integers 1 to 20.

12. The polypeptide or polypeptide construct of claim 11, wherein the linker is S(G4X)n, n is 1 and X is Q.

13. The polypeptide or polypeptide construct of any one of claims 1 to 12, comprising a half-life extending domain.

14. The polypeptide or polypeptide construct of claim 13, wherein said half-life extending domain (HLE domain) comprising, or consisting of, two polypeptide monomers with each monomer comprising a hinge, a CH2 domain and a CH3 domain, wherein said two polypeptide monomers are fused to each other via a peptide linker, comprising in an amino to carboxyl order: hinge-CH2-CH3-peptide linker-hinge-CH2-CH3.

15. The polypeptide or polypeptide construct of any one of claims 8 and 10 to 14, wherein said polypeptide or polypeptide construct comprises in an amino to carboxyl order: Binding Domain 1 (VH/VL-Peptide Linker-VH/VL)-Linker-Binding Domain 2 (VH/VL-Peptide Linker-VH/VL)-HLE domain.

16. The polypeptide or polypeptide construct of any one of claims 9 and 10 to 14, wherein said polypeptide or polypeptide construct comprises in an amino to carboxyl order: Binding Domain 1 (VH/VL-Peptide Linker-VH/VL)-Linker-Binding Domain 2 (VH/VL-Peptide Linker-VH/VL)-Linker-Binding Domain 3 (VH/VL-Peptide Linker-VH/VL)-HLE domain.

17. The polypeptide or polypeptide construct of claim 15, wherein said polypeptide or polypeptide construct comprises in an amino to carboxyl order: Binding Domain 1 (VH/VL-Peptide Linker-VH/VL)-Linker-Binding Domain 2 (VH/VL-Peptide Linker-VH/VL)-Linker-HLE domain-Linker-Binding Domain 3 (VH/VL-Peptide Linker-VH/VL)-Linker-Binding Domain 4 (VH/VL-Peptide Linker-VH/VL),
wherein Binding Domain 1 binds to a first cell surface antigen, Binding domains 2 and 3 bind to CD3, wherein Binding Domain 4 binds to a second cell surface antigen.

18. The polypeptide or polypeptide construct of claim 17, wherein the peptide linkers within the binding domains is (G4Q)3 and the peptide linker within the HLE domain is (G4Q)6, the linker linking said binding domains is S(G4Q), and wherein the linkers linking the HLE domain to the binding domains are G4 linkers.

19. The polypeptide or polypeptide construct of any one of claims 14 to 16, wherein the linkers linking the HLE domain to the binding domains are G4 linkers.

20. The polypeptide or polypeptide construct of any one of claims 10 to 19, wherein said cell surface antigen is a tumor antigen.

21. The polypeptide or polypeptide construct of claim 20, wherein the tumor antigen is selected from the group consisting of BCMA, CD123, CD19, CD20, CD22, CD33, CD70, CDH19, CDH3, CLL1, CS1, CLDN6, CLDN18.2, DLL3, EGFRvIII, FLT3, MAGEB2, MART1, MSLN, MUC17, PSMA, and STEAP1.

22. A polynucleotide encoding a polypeptide or polypeptide construct as defined in any one of claims 1 to 21.

23. A vector comprising a polynucleotide as defined in claim 22.

24. A host cell transformed or transfected with the polynucleotide as defined in claim 22 or with the vector as defined in claim 23.

25. A process for the production of a polypeptide or polypeptide construct according to any one of claims 1 to 21, said process comprising culturing a host cell as defined in claim under conditions allowing the expression of the polypeptide or polypeptide construct as defined in any one of claims 1 to 21 and recovering the produced polypeptide or polypeptide construct from the culture.

26. A pharmaceutical composition comprising a polypeptide or polypeptide construct according to any one of claims 1 to 21, or produced according to the process of claim 25.

27. The polypeptide or polypeptide construct of claim 20 or 21, or produced according to the process of claim 25, for use in the prevention, treatment or amelioration of a tumorous disease.

28. A method for the prevention, treatment or amelioration of a tumorous disease, comprising the step of administering to a subject in need thereof the polypeptide or polypeptide construct according to any one of claims 20 to 21, or produced according to the process of claim 25.

29. A kit comprising a polypeptide or polypeptide construct according to any one of claims 1 to 21, or produced according to the process of claim 25, a polynucleotide as defined in claim 22, a vector as defined in claim 23, and/or a host cell as defined in claim 24.
